United States Patent Application Publication US 2022/0211063 A1 - sequence listing, part 31

SEQ ID NO: 103 - DNA, 8605626 bp, Penicillium roqueforti (residues 3,442,253-5,163,378 of 8,605,626)
  misc_feature (89143)..(89590): n is a, c, g, or t
  misc_feature (91422)..(91652): n is a, c, g, or t
  misc_feature (329881)..(330017): n is a, c, g, or t
  misc_feature (430768)..(431099): n is a, c, g, or t
  misc_feature (461651)..(461667): n is a, c, g, or t
  misc_feature (496410)..(496589): n is a, c, g, or t
  misc_feature (532013)..(532107): n is a, c, g, or t
  misc_feature (539763)..(539898): n is a, c, g, or t
  misc_feature (569547)..(569751): n is a, c, g, or t
  misc_feature (649064)..(649200): n is a, c, g, or t
  misc_feature (691125)..(691187): n is a, c, g, or t
  misc_feature (866510)..(866674): n is a, c, g, or t
  misc_feature (1032466)..(1091865): n is a, c, g, or t
  misc_feature (1092552)..(1092763): n is a, c, g, or t
  misc_feature (1210196)..(1210408): n is a, c, g, or t
  misc_feature (1240554)..(1246826): n is a, c, g, or t
  misc_feature (1247753)..(1253685): n is a, c, g, or t
  misc_feature (1258304)..(1372303): n is a, c, g, or t
  misc_feature (1374137)..(1374545): n is a, c, g, or t
  misc_feature (1457544)..(1457830): n is a, c, g, or t
  misc_feature (1505357)..(1505529): n is a, c, g, or t
  misc_feature (1513228)..(1513390): n is a, c, g, or t
  misc_feature (1624050)..(1624251): n is a, c, g, or t
  misc_feature (1669160)..(1669365): n is a, c, g, or t
  misc_feature (1761228)..(1761454): n is a, c, g, or t
  misc_feature (1817775)..(1926074): n is a, c, g, or t
  misc_feature (1933175)..(1933425): n is a, c, g, or t
  misc_feature (1963987)..(1964364): n is a, c, g, or t
  misc_feature (2150522)..(2150620): n is a, c, g, or t
  misc_feature (2196752)..(2196960): n is a, c, g, or t
  misc_feature (2250746)..(2250802): n is a, c, g, or t
  misc_feature (2391558)..(2391849): n is a, c, g, or t
  misc_feature (2493588)..(2493819): n is a, c, g, or t
  misc_feature (2532194)..(2532471): n is a, c, g, or t
  misc_feature (2536340)..(2536581): n is a, c, g, or t
  misc_feature (2786627)..(2786883): n is a, c, g, or t
  misc_feature (2859585)..(2859876): n is a, c, g, or t
  misc_feature (2873996)..(2875100): n is a, c, g, or t
  misc_feature (2881617)..(2881922): n is a, c, g, or t
  misc_feature (2897171)..(2897349): n is a, c, g, or t
  misc_feature (3050746)..(3051470): n is a, c, g, or t
  misc_feature (3057261)..(3057512): n is a, c, g, or t
  misc_feature (3069611)..(3069986): n is a, c, g, or t
  misc_feature (3075842)..(3076216): n is a, c, g, or t
  misc_feature (3304906)..(3305003): n is a, c, g, or t
  misc_feature (3318192)..(3318516): n is a, c, g, or t
  misc_feature (3502503)..(3502617): n is a, c, g, or t
  misc_feature (3537788)..(3538371): n is a, c, g, or t
  misc_feature (3783217)..(3783431): n is a, c, g, or t
  misc_feature (3992070)..(3992188): n is a, c, g, or t
  misc_feature (4004970)..(4005233): n is a, c, g, or t
  misc_feature (4027160)..(4027360): n is a, c, g, or t
  misc_feature (4058285)..(4058431): n is a, c, g, or t
  misc_feature (4267035)..(4267072): n is a, c, g, or t
  misc_feature (4352538)..(4353000): n is a, c, g, or t
  misc_feature (4361537)..(4361689): n is a, c, g, or t
  misc_feature (4393455)..(4393688): n is a, c, g, or t
  misc_feature (4451187)..(4451324): n is a, c, g, or t
  misc_feature (4461216)..(4461462): n is a, c, g, or t
  misc_feature (4480922)..(4481040): n is a, c, g, or t
  misc_feature (4533587)..(4533724): n is a, c, g, or t
  misc_feature (4589847)..(4590075): n is a, c, g, or t
  misc_feature (4668669)..(4669001): n is a, c, g, or t
  misc_feature (4736843)..(4736937): n is a, c, g, or t
  misc_feature (4766465)..(4766662): n is a, c, g, or t
  misc_feature (4834245)..(4834552): n is a, c, g, or t
  misc_feature (4927235)..(4927808): n is a, c, g, or t
  misc_feature (4944816)..(4944966): n is a, c, g, or t
  misc_feature (5082236)..(5082384): n is a, c, g, or t
  misc_feature (5112277)..(5112998): n is a, c, g, or t
  misc_feature (5314355)..(5314548): n is a, c, g, or t
  misc_feature (5372288)..(5372715): n is a, c, g, or t
  misc_feature (5458669)..(5458780): n is a, c, g, or t
  misc_feature (5479980)..(5480153): n is a, c, g, or t
  misc_feature (5535122)..(5535136): n is a, c, g, or t
  misc_feature (5567270)..(5567409): n is a, c, g, or t
  misc_feature (5598490)..(5598703): n is a, c, g, or t
  misc_feature (5726526)..(5726604): n is a, c, g, or t
  misc_feature (5743037)..(5743505): n is a, c, g, or t
  misc_feature (5807199)..(5807285): n is a, c, g, or t
  misc_feature (5919535)..(5920213): n is a, c, g, or t
  misc_feature (5921527)..(5921833): n is a, c, g, or t
  misc_feature (5942409)..(5942688): n is a, c, g, or t
  misc_feature (6010874)..(6011169): n is a, c, g, or t
  misc_feature (6324695)..(6325013): n is a, c, g, or t
  misc_feature (6397105)..(6397216): n is a, c, g, or t
  misc_feature (6604362)..(6604532): n is a, c, g, or t
  misc_feature (6843301)..(6849052): n is a, c, g, or t
  misc_feature (6859407)..(6860047): n is a, c, g, or t
  misc_feature (6914764)..(6915551): n is a, c, g, or t
  misc_feature (6918855)..(6923725): n is a, c, g, or t
  misc_feature (6950174)..(6950310): n is a, c, g, or t
  misc_feature (7009778)..(7010015): n is a, c, g, or t
  misc_feature (7088368)..(7088591): n is a, c, g, or t
  misc_feature (7280661)..(7280840): n is a, c, g, or t
  misc_feature (7435020)..(7435145): n is a, c, g, or t
  misc_feature (7579716)..(7580036): n is a, c, g, or t
  misc_feature (7597713)..(7597862): n is a, c, g, or t
  misc_feature (7638927)..(7639043): n is a, c, g, or t
  misc_feature (7648137)..(7648344): n is a, c, g, or t
  misc_feature (8007031)..(8007217): n is a, c, g, or t
  misc_feature (8052759)..(8053224): n is a, c, g, or t
  misc_feature (8128886)..(8129301): n is a, c, g, or t
  misc_feature (8133596)..(8133784): n is a, c, g, or t
  misc_feature (8187871)..(8188020): n is a, c, g, or t
  misc_feature (8239554)..(8240025): n is a, c, g, or t
  misc_feature (8245462)..(8245573): n is a, c, g, or t
  misc_feature (8304738)..(8305328): n is a, c, g, or t
  misc_feature (8313694)..(8317811): n is a, c, g, or t
  misc_feature (8345163)..(8345264): n is a, c, g, or t
  misc_feature (8407543)..(8407749): n is a, c, g, or t
  misc_feature (8424434)..(8424559): n is a, c, g, or t
  misc_feature (8481328)..(8481551): n is a, c, g, or t
  misc_feature (8596939)..(8597185): n is a, c, g, or t
cgctgggaagcctggggatccatgacctatatgtatatggttagaccttacgattaaagggaaataggcagggcctactgggcagccgttagaggccgtgtagaccggagtctcattgtagcggtaggttcctatgaaagagaggggattagtcaatgttatcggctttgacaaggaatgtaaacctactaggctcgttgtcttgacccatgatcgcagattgtctatggagaagagagaaaagtcccgggagcactttggtttatatagggccttcgggggaaccatggaaaagttcaatgaagcccatagccccaccagcatctgatatgaaatcatcctatcaccaactatattgatataaaacaaacatctaaaatgccaggcctaggtcagacgtgtatgctatatccaatcgtaaacaaggccgatgtcatcctctcgggtccacttcccggaattggagtaaaaaaggacaaggaataggtttgtaagtggatggtggccagaccgagagcaagaaatgccaggaggtcaattgttctcccaatatagcagttcgatccgagctcaagcttgtttgttctgtcggcacgatccgagatcgcgaccccgaagatacgaacttggccttgcagagttgttgagctgcagacaagtcagttaatccgcaattttatatccaacaaattcattggactatctagttatcagagtgtgacagcaaccgaaaattccaagggtcagtcccttcaaggtgttgcgcaaggcagtgcctcgacaaagaaccctggatagtgcttcccttagaattagtgcaaggaataatcaaaagctcccagtagagtcgtgcgtgcacagaggattgaaaacaacaagaaaccaaaaccaaaacaaaaaaagctcgctcaatgcgccaatcatatatcttgtatatcgcagggaaagggaaaacccaaagcaaattgagccctgatcaaatcataagaatgggtgggtatatatagcgcttgcgcttcttgagagcctacggatcaatctatttaaaggggcaccaagagtatgctgcaagtgcatgcatgggaaggaacaaggtttaactggtaggagtgggcgccaaggtgatcgcaggcgagttagtggactcatcccgacatcccgacatgtttcccaggctatcacaggtcgaggaagagggcgaggcagaagtagcggtagtcgtagctaccgtgctcgttccgtcacggcagccaaaccaccctgggtcatgacagctggtcgttgcagtcaccgagggcaaagtagtagtcaccgtgggtgacggaatggctgttgtggtaggatccttgcacccgaaccagccaggagtcttgcatgtagtagtagtggcagtgcttgtcggtgaagttgttgtcgtagtggtagcggttgtactttcatccagacagccccaccacccgggggtcttgcaagtagaagttctggtgggagacgcggtggtggtggtagtcgtagtagtcgtgacatcggagccgttgcttcggaagaacttccagagttcacagtcaaagcattcttcctctgcgacacatgaagggacattgtcgtatttcaagataacatcagatatcacattctcgatcttgtgggtaccaagaccgacacgccagcccttgtctgccacagtgtcatacgtgcacatttgtccggtgtgacatgctgactccatcgcatagccgccccatgtacaaatagagttgattccattgcaggttcccatatagattgggtctgctgtatgtccaaagtggtaggatccagtgaactgtcgcgactgtggaaaccgcgggtcatagcctggcggacttgggaggccaagtcgagctgcgggcaatgcttcaggaacggcctcgaaagtgaccacaggcaatccgaacgtcaatccaaccagactcgtcatggcaccacccagcgaatgaccggtcatccaaatatttgcatctgggtagatctcggtaacgttagagtatagatcgatcgctgcccgataataacggttttcgtcattcatagactcaacgatacatgtcagatttgccgtaaatgtagcactctggcaatcgcaggattgtctccatagatatgagcctccttggccacagcaacaactaaagaatagattatcgttgactttatcgtttgttgtggtgccagcgccatcaaagagagcgggcgaagtgcccttcagagaaatgacaacagtgtcattcgtcttatcggagtagatgtgccctctcaggccatccgtttgccaaccaaagctccccgaatagttgaatttgccattaatagtgtgccactctcctgttccaggctcctcaatatagtcatttgcagtcatttgtgcaaatgtcaaaacagtctgcttatctgtaatattcggtccaggcaaggtgtccatgacccattccagtggagacaaggcggtcgcaaagcccgaagaccgtgcagctgccaagtgaccttgaatcacctggagtcgccgatcggctaatcgttgtatcgtgagaggacttgatgaggcaagcagagtggaatctgatgcaatatattcttcttcgtggccatcttcggatatagttcgaaggcgagtgtctggcttgacgtcgagtctcgcatgaaagtcgggttgttcataggtgcctcggtgaaagatgtggcgcaaggactataagcgggtatgatggtcagctacagataagaaaacttgagtcaggcatcttacaaactcatgggtgtctggtgtaccctcgtccccattcaaaggtatgacgggaacttgtggagagggtagatgatagcctgaggcggaggcagcacctgacaatactgcagccgcaaataataggctgcggatgctgatttcaaatcgtgaacattttcgagccatgatggggatgctgatgaggatcaaggtcaaggagacgtgagtctatcgcggttatcagcaagtcacttatcaagtgacgaagtgacgcagtgcggagagcgatcggcacgtgatgggtacccccgtgacgtgatgcgatatcgtgtattcctcgtcaatttggtgtcttctcaaatgatcactaggagagtgatacgctgctgttgatcagctgcagtatactccgtgacaagtacggagtactccgtacttccgatcgctttactactggacaacaggctcaggccagagctaggggctctcggacgcggatcgacatcggcctatcagctgcatccgggagcggagacacgcaattagtgccttatagaaccccatcgcccctggtcttaaaatgtctggctctgaaaatagcagtcggcctcatctgaatctagcacggtcattcatcagaatgggcgactcggaagtgaaatctcctacgattgagcaagattccaaaacagcacctccatcgtcacctgtcaataatgaggggcaggaaaatggactcgacgtattcgaaagaccgggctccgcagactccggcacaacaggcgatgcccagacagatgatggctttgtgctttcgcgaagcgtacaagacccttcggaggaattgccgatcgaactaatcagcctggcagatcggtaagcgtgatcatatgagtgcccatgcttcaacgttttattctgacagccatttctttaatagattcgtgaattctctgagcgccaaagttcataactcgcctcccacgatcgagaagatctccgagctcttccaagttttctacagccgcgccgagtcccacattgccacacatatatctgctctcatagctcgtatcaaccgggatcttccgccccaggttcctgcaaaagctccacgaggaagcgcactgtcgaaattgagcagtaaacgctctcaagacgatatcaggccagcagcttcaggtcgccaaatgttgactgcgtccgaggtggctgaaaagcgacaggctcgcagagcccttgaaaacaaaaggagcgcattagaagaggctgccgaaagaagggtctgcgagctggtttatgataaactctggaggcacaaaagtacattggatgatgtgcgggatgaaaagttgcgttccaagactgcggctttgctgctggtcggcattaatctaaaggatcttgggatcgatatagaccttgaaacaatcgatgagcagaagcaggacgaagcaaacgaattcctttgtcaggcccgagagtatctcgccaaaatgaacgattacaaatacccccttggaaagctacagcaactcgcagcggcgcacaaggccatcgtcgacgctctcactaaacttttaccgtcttcctcttctgcggatgagattctgcccacgttaatttattcgcttgtgacgtgccctccggaagggatcaacattgtcagcaacttggtttttatccagcgtttcaggtcttcaagcagaattgacggagaaacggcttactgcttaaccaatctagaggcggccataagctttttggaaaacgtcgatctttctacactacgtgccgatgagctgcaggatggccctctgaaaacccccggtgaaactacgacaccatccgtagaacatgtcgatccttttcggccccccaaggaggctacaaccttggctgtgacgactgtatctgcatcgccggaattgtcaacaccagaaatcaaggaacccgcctctacattacctagacctcgaccctccatcacaccacagcaacgacgcctcagtaacattttccaaccgccttctaaggtcctcggagctgcaaatgatgctgttcgcaccactgcagaccagagtttgaagaacattggtgctacattggacagcagtttcaactttctgtttggtcgtctgaaggagatgcaaaacatccaaggaccaggcccggagggtagcggtccaatattgccaaagacactggccgaagctcgccgtctagtgagcttgccgcttgcctctgctaccaaccaaaatctgacccaaggggagctcgcagcaatcaattctgtttccgtggatgagagcacacccccacgcagtagttcgagactcacagatctctccaacactcctacctctcgagaccgaagtgtggacagcactcgaacccagggaagcggtaaaaagtccgtcacgacatcactacgcgaagattttgcattgagttcacccataagccccactccgttagaatcaatgcgaaactttggcagcacgcttaaccctctgaaccacatcccgggcatgatgaagagctttggccgcaacgcaccagagactcccagcggcaggtccgtatccccatcgggattggacagactcaagccatcacctgtttcagcagacggcaatagtggttctaacagcccgctctccaacccttcatcgaaaattgatcctcccattcagcgtttccttgagacacagaatgcgagtgatctccggatcggggacgtagctgttctactggaagactataagcgacttgctgctgcgcttcacaaacctagtaccgagtcttgatatgtttatggttggattatgttgttttgtccttcacattcattgcaacgggagatggagtattcttgcattatggatcgatggcgttattatatctggtattctatttcatttgggcgaataaaccttgagttagatagcatagctctggcgagtgagctacgcattgtccatatcatacatcattttagcaataatcaacccttcagaccaacatgaataaggatttcaagattcggagatagtgtgcacagttacatgttttgcttattcgttcaatatcccgaaaaggatgcttttgttcaagttggagatttacatgaagcgcacaggcggaggccaaatcctatccttctcccctggagcatccttcgaccaacgtgctgctttatgaagcattttcaactccgatatgttgcgatacggctgacgatttacctctggggaaagatctcgttgggtgaaacgcgcaaaaagtgtcggagcgatgtggttgatatgaaccttgagtggctttgcaatgttttcattgtcaggttctagtaaccagacgaatggcctaggaacatcacacgattgcaaggaatcttgatccacatagagaaaggagtctcgtcgtagaccaacagggaattcgttgctgtctcgcatagaagcgaatcgatcccggaaattaccggtaccatcaccggtgtcatcattttctacccaatgaagagcaaactttgcaaaagcagattctttcactaaggtcttagcacattgtaagccgtgttgaacggcagtttggatttgctccttgtacgacggccactcctggacatcacaaatggtaattttcggcgtcaattccgcaggtcctcatattctaggtgtaaaaggggtataaaaatatgaacatgaataaatcgagtcctgcagtggctaattgggcataacacaatcatctcaaacaacataagggttaatgataagagtaagagagctatttcgcaatcacgggtggcgtccacgcagaacctctgcaccgccagttctcatctcagtcaatttattcgtcaactccaaactttgtgtttcaacttggtcatggcggcgcttgacttcggcttcaaacacagcagctgtgcgacgacgggcacgccgtaaattcttcatttccgaaagaagatgggtgaaacggtcgatcatttggtctccacagtcttcccattcatccatggtcatgtgggacaaatatgtttggcgttcttggtccgtcagagtcaacagatgggagacggaattattgggtacctcagtatctgtgacaagagatggtgggtttggcggtaaggaaggtgatttgatgacaggtggaggaggggtcggcgatttgtcaaatggctcagcttggagttcagagaaagacttttggtaaagcacttctggagggtagtctgcttcaagtgatcgctttttcgaatggatggcagtgttgcgacggctgcgacgcgatggctcatgcaatttgcgcgattcgtgcacaaaaaacggatcctgcatggtgtggtcgacgtctaggtcggttaaactggtcatatcgaaggcactgattgaaaccccgccgctttcccgtcgttcatccgggcgtatggtgtgctccatgccatcgtcacttccaccgtcactatcggtaagttcgtgaaacgatgtaatgctgagtgtccggccaacatctggcggaggttgagagtcatggcgagtaggtgatgcatcgagttgttggtcgagttgttcgagaagtgaaggctttggcgggctgaaacgtgtcctgggtattgctgacgagctgtgagggagaagaatcttcctgggcccagtaggaggaagcatttgacccaatttccgcggccttgacgtcggttgtggttgtggttgagtctgaggctcgggatcagagtctatagtgacaggctgccgcgaagaagttctctttctgctggcggaccagaaattctctaggcgcttgctcaatggctcctcggttatacgtgatttgtgcgacgcatgccagtcgtgtgcttcgtcggtcttttcattatccccgccgtctccgccaagagacgaagtcatttggctttcagagtcatcgaagtcatctgaatcaaagccggccttcttcatggcttggtcacccaggccttcataccagttaggcccataagtatggattgaaggtcggggctgatacatcgattgaggatcggggttggtgtaggcagcattagtacttgatgctgcctgagatttgttgtcatcaaatccgtagacactagtccctgccacggttgaatcatcaatcgcttccacgtctgtgtcgaacacgtccctgtcccgctgtatcccatgcgtagagagattccgggactgatttggaaattgagatgtaccgttaaattctagagatccagatctgccattggcccctgaaggacctggatcgaccagctgggtgaccggtacctcgactctggcttgttctgcacgttgctggcgcgactgggtggcttggccgtgagcctgcccaccttctttggagtggacataatcgccaacccccatagtactttttgaagctagctattgtaggggtaatgaataaatgtggtctttttcgatgacgctgaaagacgacggggtccaccgtaaggttgttgggcaaacgcgatatcgccgcgtagtcacgtgtcgatcatttccaccggctttaagcctcatctacagcaattagggccgccacggctgtatggaaccttacagcggcggtaacctccgggtataaatcccgaacaacatttagctaatgtgcttgactaaattgtgaataccagggccaactaacgccacataagggtgtaaatctttctctaggatactgggcaagggaggtttctaattataagataatgtttacctataaataaatgcatttcattggggtatattaagtataattttacatgaagttccagaagagaggaacatcaagatcatctcaaccaggacctcaatcagcagaatcatcatcaatatgaagactctccagattgtatgcaacacccctgcctcgtttcttggccttctcgaagagctcaatcgatctttggacttcagctgctttcttttcggttgcaagcctgtgctcacgtctcgcttcaagagagcctggggtcctatccatgagcattgggtcgtggtcgtcgtagtcttcgaagtgggccggtaatggtagagtgagcagcaacagatcaccgatccacaaacagatcatgcctctgagctccagcaattctggcgagtccgagtatggaggagaccctaggagctggtccatacgcgcagcaatttgctgcgcctgtgccaactccagtgccctaattgctgtgatggcagcatctgtcttgttttgtgacttccgagggtggccaaattcagattctgaattgtcatcctcagaaaactcatcaggctcttcttcttggcgaagggtaatatttttcctagttgccttgctttcttcctgtgtgatatacacccaaagcccaaacattgcagggtagaagtgcaaagaggagatagactgtggtgaagatttcatgaatgggtgattgagaataagtcgttcataatattctttagctgccgcaaagcccttggtggtaaaattgatgggtgtgctgtccatcgcattcggcaccttaatggtaccaagattggctgggatttcctgttcgtcacgccgtagcaagatttcagcgccaatgccccaccttccttcactgcggacgtccattcgaaagcctctgtaatcttcgcgcaagatcatgccccaagctcgtccggctcgaacgtaatcaccttggagcatacatcgatgtaaaatggctgtcaatgcacttaggtgttggaagcgaaggttgccttgctgggtcgactgaggagggtagattggaggtgataatcccgctaagtctttgaggtggcgtgaggcagtctctcttctagattgctcatcattatctgccttatgagggaaatggcctttcggcaattcttggttggatgggaaaccggcaattcggtattgatgggattcatttggtgtcaagaccaagggaggcccagcgggctcagattccgtagccgaggcgatatccgttgtttcttcgccgttcagctcgctttcactccaccccacactccttttgcgtttccggcggtcatatcgagatacgcgagtgccaggcggctggagccaaggcggtagcggtagagaaaaaatcgaagacgacagcgcagccatatgctcaagatggggcgtattccatgtgccgccaaagaaaataagagccgtggcagtctatactagggcctaggctattgttgccccaattgatggttgcgcatttgtcagagagattggtggtggaacatgacggaatggagatgtgttgcctcaggcactcaaggcgaagcaaagcaggcaaacatcatcacttatcgtcctctatcaattgcttgctttgacatgactcctctactcctccttttactttcccttttcttctagttccccctttttgttttgccgagcgctctctcacccccgtttcgcgcttgccagtcgctggctgttcttttctgggcgtggttaccatagctccccgagattcaaggctcggcggttataccactcggagtgtgggctgtgcctagactcatcagacagtttgatacatctggccgctgttgctcgtattgggcagtgaaattgtctcaggcgtctcgtaccttttgcaaataacccggtaaccgcgaactccctgtccgctatccactcctttgttccaaaggtccgaaatacggcttcttcagaagcaccacccaaaaaccaaccgcatcgaccctgtcagcttgagcaagggatcaacaccattcccagacatcacttggatagccttacttgtcaaatccatctcctaggttcaacccaatatcgatacggtcgccgctactagccatatggtcctcgcgtggcaatgaacagtcgttgacactgcatcactccaacggtcacaactctgttactatgggacagtcctcttctacacaacgtgatccatccaacaacggctatcgagtacactttgcacctttctcaatacagcgtggccctaacacgagggatgaaaacatgaatcatagacaggcggctgaacacaacggagagggtggtttgccaccccggccagacatgaacatacataataggagtgaccaagatatggcatccgaccggccaggccgaacatccgctgggggctcacaacctatgcgaagtatcgaagaggagggcgggcccgaatatgagctcccaccccgcgaataccgcactgcggcgtttgctcgaatggcagcacgaagacaatcgaccatgtcaagactgggctctaggcttcttccaaattcagtcattcgtggacttctcaacagtcaagaagagaccccggccgagggacatgcacatcgacacggcctagtctctccaagagctgagactgctcaaacatccggtcggttcagtgcgttcgattcattcggctccagaggaattactcggcgccgatctgctcgcgcgccatatttcattccaccccgtccggagtctgctgggatcccagatgcaccagcaaccccgacatacatcgactctccatctcaaatacctgacccgacaagagcatcctggcgtcgcagtgtcaggctacaacgcatgcgtcattcgatttcatctcccatttctcacatgttcggccagccacactcagatttgcggccgcacgaaagcccggaatacccaatgtcagatcctttatttgatgatagggctatggacacgcgtctggacttcggcgaacccccccatgaacttgaatcactagaaccatcaatccaggctgagaggccggtaactgattcgtcttctgcgcagccgagtcctgctttgatgcgccgattgcctgggatcatccgagcaagatcatccagagtcctgcgacgagaggagcaaacacctctgtcaagggtccttcagctcgccgcatccgcaattgcagctcagctgtccggcactgccggtcctgcgttgcctaacatccaggcattgggcaatgacgggttagatggctctttggagaatttcatccagagtttgcagcacgcgacttctgcgcaggctcaaccgcctgcagcagacgggtcgagcagtactgcaaacgaaggaccctcgcatcccgtcaatttcttgcgtgtgttccgatttgccaattcagaaccatccacaagcggcgctgcaaggcagagcgcgagtggtgtcggcgaccatgggacccaaaccgatggaatggacatcgacgagcctgctgaaggcgcagggcgaacggttacactggttgtcgttggagttcggtccgtcctggccggaaacgcaggtcataccgaacagcaacagcccgtaagtccgggcccaggtctagatgctctgcttggtctgccatttttgccacataatactactatcccacggcctcaagatgccactggtgaacctacccaacggagcgatgggcgatctagattgactcttcctcggaaccccaccggagctacagaacttccacgcccgtcagttcccaatcactttagaagaatgtctgataccggcccccgtgctggattcccatcctatcatccgtccggtttctctgaaagtcccccggggccacacccgcctccgtcaacaccagctgaacaggggatatctgctttatcctccggcacttcgactccgagccgtagaccatcctccgcttcagcaattgctcctgatattctgccccatctacatgaaggccaggcaatgcgaccgacggcggagactctggatgagcctgtgacattcaataccgctcgccagcgacgtcgaagcgattctgagtatgctcgtcatcgggccctcggctctggtgctgttcgacgcaatggcatggttgaacccgatcaacccccaccaagtggaggtcgcagttggttaatttatgttgttggaaccaacctttctgaaaaccacccggctttgaccacacctagtcttttcaccgatgtaagaatgccctactactcggctttgtcaggaacatgatgactaatactttaaacagaacccaacctacgaggatatgatcctactttcatcactattaggtccagctaaaccccctgtcgcctctcagaccgatatcaactccgccggcggaatattccgtcttgtcgagtatgcaggttcattggtcgccgaagccgtcgaaggcgctgcctccattcaaatccaagatggggagcgctgtttgatatgcttgagtgattatgaggtggcggaagaagttcgagagctgaataaatgcaaacatgtcttccacaaggattgcatagaccaggtttgttgcctctgtccattcgatttcaatctgttcgcttgctgaccgtatttcgtagtggttaaccactgggagaaactcttgtcctctctgccgaggtcaaggcgtcaacgaaacccccagcaacgactccaataccgacaactcggtacccagtcctgcccctgctccggctccggctccagatggcacagctgtctgatctcttccacctagcaagcatggtcaacccaactatgtgagcaactcccaccttttggctttcgaaattcttctctccttttagctttagcatgcagcgtgtgtttagaacctgtaacgatttttttctccatggatatcccctttgcatctcatttctgtgcatcgacttttggtgcttttatcatgttgggttatcgaatatttggtctcggcgcctagaaacaaggaaccctcctcttggaagataactctgacttcgagcctcgagaatgttagtctttacgtctatcaattgttggtcttcgtttgttctttgtaatttcgtaaattgacacattggctggccatacccatggctctatctggctaggaaatgttctactcattgaaatacatgtacaaacaataaggctatacaaccatctatcatattattgccattgatgttccctgtatatatacgtggtagtataccggggcccgctgccccgcggctgacttaggtaatccaaaaaaaatcacccaactccattgcggcctggattgcgccagcgatcttgtgctatttcgtttattccctaagctttgagagtagaatctgcagtctctctaacaaaggcagtactcaattgacctcaccgcatccgaaaaacggttcggccgtgtagtctacactttcaacctccggagtccgcattttcacgacaacccccgctacaacccaccatgacttccccgattcgcgtcacagtcctcatatctggcaatggctcaaacctacaagccgtgatggataaagtggccgcaggtcagataaacgcaacaatcgtccgcgtaatctccaaccgcaagaccgcatttggcctcgagcgcgcaaccaaggccaatatcccaaccgaataccacaacctggtcaagtacaagaagcagcaccccgcgacaccggaaggtattcagctcgcgcgcgaggaatacgatgccgagctcgctcggctgatccttgtcgacgcgccggagctggtcgtgtgcctcggcttcatgcatattctctcaccgcagttcttggagcctctggaggctgctaagataaggattattaacttgcaccccgcgctgcccggggcgttcaatggcgttgtaagtcctagagctctttttgagattgtacattgttagctggaatgatatgctgatacctgtcttgttgatttttagaatgcgattggccgtgctcatgctgcgtggttggcggaccagattgacaagaccggtgttatgatgcacgatgtcatttccgaggtggatatgggtacaccaattctagtgcgggagatccccttccggaagggccaggatgagaacctcgagacctttgaaactcgggtccatgagatcgagtggggagtcgttgttgaaggagtggataaagtggtaaaggaattgatggcccagaaagaaaaaggctcaagtgcatgaatagttacccatttgtcttgggtgacattattacttcgcatggtgtacgaagggacgccgcgcttctcgatctgcattttgttggaccaatgatcgacctaggactgcaagtcccgcatgatgccatcttcggggctgttgacgatttatgactgtatatcttgtatgattgcagaaaaacaaaaagacatatatatgatcatattgcaaggtgtatatttcacgtgttctggggtgccaatttggagatcaaagccgcggcgtggattaagacaagaccaagacatccactaccaactggaggaaagccaagaacgtgccgagactaccgttcagacatacttcgtatccacgtggacaatcatgattcatacctgtctcatggtacggaagcacggagtcatgatagtggaaataagaaatggagaatcataaatccaacggcgccccaagccaagctccttgataatcaacagggatgtggaatgcaaccatttcaccggtcgaattctcatcacacgccagtcctgcacggcggatttagctgcatactagcccctccaatagggaactatactatctttgggaagtttatgcctggctaccctacggactagtccattcaaagtcaggcttgcgaaccgcatttgaactatgtctcccacctgcgcatcccgggtaatcattcgggggatttgtatgaccccgccttatctgtaacgtaggacagatcataaacgcagttcacgcgggaaaagcatacactagcaaaagagggtaggcgtggtccatgcagtgcaaccaagacaaaaaagtgggcaatcagagcgttgcagcgctaaggtggccgttggacctatgatcgtggcgccaacgtgatagatcaaagtcaattcctaacgtcttggttcaaggttgtctgatggctccaccgttcctaattccgtcggatgttgggcttgatggtggattgcaacgatgtgggttacttttggccccaaattcacaccggcgttaactcaagctgtccggacatttgagatcggcgaatatcatatccatttcgagcgcggactgggatctgtcatggccaagtttgggggctctgatagtggttatgctttgcttgtttcatgcgcttgatacaacatagacgataataactgaacccccattttgtacagtgaagacagacatccgaggttataggatgatcattacttgacctgatactattttgaaaatcggggtagtcagctccgactgccgagaataggaccaaccactttatatccacctattaggatagtacggagtatatatccatgactatggtaaaaaaatcaccacaacactgctttataatacctttaacccgccatggtaaccaataatagagagcttggcttgtaaacttccgggccgacatatttttacaagaaagacacttttcttcgtggcgcgcaatgacgacaatcttgaacaaccttttaggaaaatgcgcaatacaaagtagacctctaggaacgaactttgatctcggcatatcaaaaaacagaagggaaaaaagaacaaaaagggggtgataatgacgatcccaagccacagggatgaatccgagtggtcttcgggcttggccaggcctactacaatgcagaggatcatgatcatagcgtctatggatctgtcccggtttccccgaggcattttgtgtacggagactccgtactccatattgtcttgcctttttctttttcgttttcgcattttgcttttgtctcttcatatcgactggggactggtggatccaaaacaaaactacggagtaacaagggcgattatccgttgttaagctatctgtgactgtacggagtactccgtactccatttaatcttcgagccgggagtcccgcaattaaataaaaagctagattcggcaattctaaatccttcgagtgcgtactccgtagataaaaaggaatgccgaaaatgttctgctgatggagatctgttctaagtggaggcggctgtagtgtgggaatcaggtcctcattcgagaatcggagaaacaatagtctctcattaaatgtggggggacattttagttcctttttcttttcctttctgtcttttctctggtcaaaaagtactccggagtcccgccgttgtaaaatgcagctgtagtaactagcaccgtgcctgatcgacagtaagttgacagagaaggtgggcctggcagatcgaagacactaaaagcgttggactgacttcaatactgactcgagtatctccatttggctagaagcttcgtccaggagctgcatcacccccaatttgacttacagcaccagtgcggatatcgaaatataggggtaagggggttgcatgtagattgcaactctatcaaacgaaaatgatacatagtacctacctaaatgataatcccgaagcatatttcaaggccccaaagctctggccacatttaacccataattaaatgtctgggcagtgcacgagcatttaatctccatgtgggtgagatataagggctaagacaacgctagtggaccaccacctggcggccctgaggctcctaagggggtttttcgggggggttttgggggtttttttgtctcgcaacgtccctacaatggtatctcatgcatcaagcttggtctaggcggatctaaataatatctctgccaggttgttatacggactaagtccgccatagatcctggtagaagttaaagtccccactaaatcttttgccactattcccgatttagtatcatttagagagcaacaaggttccaagggagagcactgactgttagtgagatcagcaggcagaaaaaagtggttctctggtggactcgctggagatcatatggcgttgtgatttgcaaggtgcgtgcgccgaatatgaaaccggtgcattagtatacgacgttcagccctgttgtcttggtcaaattgaatagcaatagagttttattagatgttcctgatcttcgttgaatagggggggctacataggatagtgatgttggcagtgtaacttgacacctactttgtataccaagacccatatgtggctccaatgaaataagttttgatatagagcaaagatcttctacatcagcccatactatatccacaatttcatattccgtatttccataccctactcttctgaagctcagaataccacgttgtacggagtacatatcgcattagatacatgaaccggttgcagatcacgctttagcttctagtctggaggcgctaaaagaaaattgtaggagtaattaaaacgaatgaaatcagtcgtcacatttttaattcgtaaattgtcgcttttatagccaaatccatgttttttcctttttgcttcttccaaggttcctttttaatctccgcacgtcccggtcactgacgtcccccaccaacttcatctctcctctccaagctttctttgataataagaatgacgactcggtattgttgaattggatggaattaagaggattcaagggggagtttgaatgggttttgtgatccgacaatgacgcattcacagtcgccccagacggccatgtcgggctttctggactcaatcaaacaggattcaagctcatcttcgtattccttgtttggaccgaaacagtattccgagagtgttgcgttttggcacgatccctccgcggcaccgacaatggtagtgcccccttcgcatacaacctcccagaaacaactctcggaccagaagaagcataagcgcacccggagcggctgcttcacctgccgttcgcgccgggtcaagtgcgacgagaaccgtccagtctgtgaacggtgtaggaaagggaaccgcgattgtgtctatccgtcacccaccgcatcgtcgtccgcatcgtccgtaccctcgaaacctagctcacgctccacagccaagtcgcgtgcaagtcgcccgcactctcacggcagtgattcatcctcgaaggtagactccgagtctctcagccctttgcatcccatcatcgacgaagaggaacccgacagttctgtatccgaatcccgaccgtcgccagcaagcgccacaaccacatcacagccggacctgcgtaagagtcaaagcgcacaatcacttcggaaacatggtgcaagacccgcgtccgacactagttcttacatcaaagaacagagtagttcgccatcaactgggtcaccgcgctttgagtcggtgagtgtgcgctcgggcagccttggacattccacaaccgaactgctcaacaacgcacgcctaccggacgatttgcgattctatttaaatttccaccaggattttatgacccctccgcatttcttcctgcgacataattcttcctatttcatccaccacagccttatcgaacttgcattgcaatatgagcctctcctctacgccctggtgggcttttcggcctaccactattctttacacagccctggggggaagctctacacatttttgaaatactataataaagccttgactctcctacgaaaatcgttgagttctggagaggagcacagtgaggctacattatgtactgttctagttctgacaacctttgaggtatattgctcctgcctcccccaagtaccgacatctttctgactttgttgcacttataggaattcattggcgactggatgaatatgatcgatcaccaccaggcggcacatgcattcatgcgaaagctaatcacaccagagtctgccaacatgaacgagctacataccaatatcttcttatggtacgcgcgctttgatgtagtcgtggggattttgtccggtaccgaaacagtcctcggtcgagattggtatcttgcaaaggagcagcatgatgccgagcaagccgctttctatccggatgatccatccaaacaactcgcccttgtggcatcaatcaaccgacgattcggcttggatatggcttccctctatgcgaagttatctcgcggcatgttatcaatggaacaattcgccattcagaacgaccagctgggccaatggctcgagcaggccaagacgattcttaggggattcgatgattacgaatacaagatccaacattacccgcagaagcaacccttgaccgatgatgacgttatcgatccatacgtcccaggtgtcttgtatcgaggtcctttgtgggatttcaactatgcttggatagacattctcgccaccgagacaatgtacaagttccagaccatgcaagtcctgcagcagcctttgcttgaagacttgcaaacattggctaaggagcaatgtcgcataatcgagacgatgattcgctggcctcacaaggaaaacggatattgcatcaactttaaaaacagccttggcatgttgggcatgttcctacccacggagcatcagcataagtatcaaatgtgggcccgacgcacattagcgttgttagagcaacatgggtaagctttcaccggcgtatctgcgtttcagatataaatcagcaagagcaaagctaaccaggagtcatctatgcgaataggtacatcatcgtccctagtttccgcgccgggctagctgccatctggcaagttccagaggttaactattggtggctccctaacgatgaagggtatacaagcattgtccgcgagattcgctccttgaccgacgaacgctcaacacagccacgcgatgagaaacgtgagaccgttcgtgatatgaagtccctcttcgggaagttgaatctggatgaaaccgacgacgacaaaagcccaccatagtgatcttgtgaatgaggtcctttgtatttgcgtcgtctatctccggtccctgagttttcgtggtcttacaagtacagtctccgctattcttggatcagtactgtcctcccgacattttcacatcgaaacgcaaaacatatatgcttactagtcaccctgacaacccgggcaactaatccgacttacgtcctgcgactggatggcacaagaccaagtctcagttgagaacgtttcattggatatcgactcacacctttcatcctttgctctgcttttgccgccctctcacatcctctcgccttctctcgaaatactcttgctatataatgtcttatccacatcctccctcgccttttctacctggtcatactatcatccccccttccccctggaccccgaagacgtctttctcggtcatgacttgatgtacattattatacccaaatccatataggatcattgactgatgccgttcattataccttgtttatacgtccctgctttcaagatttttcctcttttttacataagccgaacagcaagccccgggcctgtaggtgcagagtcctaatgttaggaatgagcacaggttgatggtgatagtagagtatctcctaagaatcaacccgacacccgggcctccacggcacctcctcggctattatgacagtctccaacccacccgccaactctccagcacctccaactccaaaatcatccccctccatatcctccccccacggcaaggcatcaacatcaacctcccatcccagcaaacaccgcagtataaccccagctccagccttactcatgacaacattcatctccttgcatcgctcatcacaaacacactccacacagccctgcggcgtaatacaggaacaagcctcaatgcgcgaaaccgcccgccggagaagcagcccaataaactcaaacgccttactagcaataccagaaccacacgacccacctttcgcatcgtagaaggtaagccgagcaggcctctgtcgcgaaggcggtttaagcttctcctcgaactcaacgggtacattcgcgcgctgcagcggccggccaagctctttcttcgcgactttgcattcagtgcggacgtcaccgggcgaggagacaacgaaggagggcaggagcgagaggacggcgtgctcagcggcgtggatggccgcggctatgtttagccggtgcgattgtaggatgtcgatagcgcgcgttgggacgtctagccacatgcccttggtgagacggtcgattggcgggttatcgacggcaacggcgtcgaggacgcggccgcgcttgtcgactttgaaaaagccgtagactacggcgtggattttgattgcgccgaagaaggcggacgaggcggaggggtcgttgccgaccagacgcattgcttcggtttctatggggtcgatgtcggtgaagtcgcgttgcatggtgttccagtcgacgtggacgcgtacgacgcgtgctaggaaggattcggtgtttagttctttaactaggtaagttgtgccttggtggaggaagatcccgccttcgtaaattgtgaataaggcgcgcgatgcttcgacttcttctatgactatgttgcggttgttggtcgtgtctatgacggcgaagtgttggtcttctgtgtcgcgtattgagacactgcgggatggctgtggacggaatcgtgggtggcagtggtagaagccgagtgaatcttttattaggcgagtcggggccagggcaaggagctgttgcccgaagtagatgctgtcttcttcggggcggataggcatctcaaatgcagcacattgaacgtggccttcgaggatgagctcgttggatagatctatctgcagctcacagttcggtcgcgtgaagatttcatctggattcttcatgtagtgttggtcagttgggtatctatccccgactaggacggatagggagtccttattgcgtcgtccagcgcggccgctttgttggcgtaaattggagatcgagtatgggaagcccatggtgatgactgcatccagggagccaatatcaacgcccaattctagagcgttggtagccacgattcccatcaatttcccctcgaacatctccttttcgatttggcgtcgatcttgagggctatagccgcctcggtagcccatcactagcttgccaatctctgttcgttcgagtctaccaaattcggcgtgcacgccttgtaagagaacttcacatagctttctgattcgacagaaggcaatgactctcacgcccctaaggatcagctggcaaaatagcctcgcagtctcagtgacagtgtcggcgcgcccagaggtaggatctttggggtctttgaatggcgtattccagcaaacaaactccttacggccagagggagatccatcgaaatcgatgagtttcacatcctgcaccccaaagatagacttcatgtgatcctccgggttcgcaacagtagcagagcaagatatgaacttgacatgacgattaccaaccgcagcacatatcctgcgaagacggcgcatgataaaagcgacatgagatccaaataagccgttgtagacgtgtagttcgtcgacaacgacaaacttcagattcttcaaaaaggtgcgccaggaactctcctgtggcaagattgtaatatgaagcatgtcaggattggtgaaaattatgcgtgcctcgtcacgaattaagttccggctccccattggcgtgtccccgtcaaaggtttcaaccattgtgtgttgcagaccgctcatatactgaagtagatccatcatgctgcggcgctgatcttgtgccagagctttagtggggaatatatacatccccctgctctccggatctttttctagttcgtgcagcatggggacttggtagatgagggactttccggagctcgttgacgtcgacacaatcacattgtggccctcatacaggtggttaattgcctctgtttggtgagcatacatttgggtaattccctttgtgttatacagagcattgacaaggtcctgcgagagctggaatgtcaaatctccgtagacagcagactgggcttcgaacacccgatgaccttccggcacaatttgtgcatgatacaaatccatctcccgaatttctgcaattatttcctcgatggactttcgctccttgggaattgttgctggcggcttctctgcaagaggagtgggcaggaaagcattcttcttttcttcaagagaattcactggatcgagattcatgtcctcgcaatgaatcaaaaacgcattcaaagcgtctgaaaactttgaatttcgtttttcaatcaaagccagcatctgtttttggctgtagacgggcattttcagatcatcgtctctcatttgacgcataggtttcataggttccccggttttcgggttcagaacttcccccttcagatcgccgtccataaactcaaatagcagaacttgctttgtgtcgtctgtatagtgaagatcactgcttctggcatcttcaactctgtccatatctgccgaaaatgccagggtacgcttgtgtaacccatactgagtaatctcttcatctccaacggtcattacttccagcttggcttcgtccacatattcgaaaaggaccgctccgggaattatgaccttcacacgtgcgacatcatcaaccgtgagttctcgcccctgaccaagttgagcttgtactgctttttttatgttctcgaatgtggtggcaaagtgctttcgcgtggagcaaaacgtgtacacgagattcaaggcgcgatgggtttgcgagaggcgcttaaaggcgtctggcaatggcgtagatggagttcgtttcgagggcttcgaggtaactttcttccctttacccgtctttttggcggctgtagttttgatagatccacctgtctgtacatcagattcattggggggaggatcgaccgtggtcgagggtgtctgatcggcagggtcttggggggacgcgttcaagggtaagggcacatcggactcaaggccgcgatcgctttcatgacttcgttttcgctttaatgatgagacttccagtggtattgagaaggagcccgccatgtcgaagctccatagtgctttatgttggagctgaagtcgataaaagtcctggttgacgggaaacgcgaaatcacgtgcattgagatcgcctgaaatggcagccgttccacggttctaaaattggccaatgcttaggtctacctcgctcgtttttatatcaccactacccaatccctctgactagcggtgaaatccaaaataattatttttcttgtatggtcctaaggacaaacccgccctcaggctagccctgcctcaatcacgctttctgcaacgcccggataggtgtagatattgaccactttcaatccaacttgggccaggatatctctccaatcagcctccgttctttccctcacagcaaaatgtgccaacatcatcatatccatattggtcgcagcaagtgtaggcttttcttcgttaatcacaatctcgttgaacaagacccgtgaataatccttcttcaaagcaggcacaagattcttcaggatcttgatgccatcttcatcgctccaatcgtggagaatagaatgaagagagtatgcacgtgcacccttgataggctgcggcgtaaaaaagtcgtgagcttgcacttcaaaagctcgcgccataccatcagctctcacacctgcaatgacaggctctcgatcctggagcacaatcctacccgagcaagggctataatgcgcagcaaaggtagccacatcatggccctttccgccaccaatatcgacgaggagaacgtcgctaatagaagcatcgaaacccgtggttaatcgctcagccacggggtagaagtcatgccaatctggcttacccgcacggtacgcgctcataaaggagtcgaaatgctcttggtgtggtggtgtttcaagaagccatttaaagaacggaaggttggttttgtgcgcctcttgaaacggaccgtcagttccacccagagtaggggaactatattcggatttcttgaagtattccgggaacccgttaaatgaagggcgtgccacatcgtagcagaaactgatgctggattggtagttctccgctgcgagactgttgctcagctttgtggcatagaaggctccgtcatggaatttcacgaggttcattgctactagatgtcttgttaggcgttgtaggagaatattgtcgatctgagtcttctgggaaaaggccgatgggctgagccctgtatctcccgcatccttgaggcattggaaaagcttcacatcgacagcgagacggatgatggcgctttgagccggctatcgtaaactccaattagtttggtgaagcaaaataagctcccaacgattttgcagcttctcacctctgcccagaatgtgcgctggatgaactcgcttgggatctccaatgctgtaatcagcgcgcggctttggtcaatcagactttctcttgagcccgcttcgttcttttcaaatgctgcgcgtgaattggcaatcccatctaggattgaggagacagatgggaaggccatgatgatatttggcgttgacagtaagtcaaaagaacagacgctgtctgttaaagaggaaataatgcatgttagaagacctacttgcccctcttcctcccctattcttgtatttttctcccagaaatagtctaaggctagctgctagtacgtggtagacgacacggatgaacttataagccattattcacccgtggaccctccaagtgcggcctttgaccaaccaggtcttagacttctatgggaaatgatatagccattttactactagatcacaacaaaaaccaaggcacggagtacctacctggttatagcgtagtggggccatatctatccttattccaaattgacaacttaccttggcgttggcgggtgctcgttcggagttgaaccgagatagtaataacaggccgttctcacatcactagatccagaaagtatgttgggagctaatcacccatgttaagtcttttcaaaaaactagcctggcgcgaactggcgcctgaaagaatctcacctcctaattatgtacaatcggaacataagctaagaggcgctatgagctaaatcgtttagctcgccgaggggataggtttcacctatacattcagttagggaaatgatctacgtactccgtccggagcaaacagttgagccgtgcctaaagtacttaaaaattagaatttcaggagattatgcctcttagttcacagtaaagatagtccctattacgttcaatccaccatttccctattcctcaacacgtatcaaataaaatctttatgactataaatatgatataaatatgtccaacagaggcagagataataggggtacgcacggtcgccttaacccgccatggagtacggagtactccgtagtagcctcaatggccaacaacaatccactttttacaacttgaataccttcaaggctatgaagtatttgtagaagaaatgtctatatctcctcaagactgttccggatcaccaacagtgatgagtagaatccaagtataagcttcctgccaaaatcatctgtttagtgacgttgatgttgagtaaacttggcacatttgaacagagttttttcctaaagcttgcctccctatttttatttgattcgtcatcgtcgctcatgggcccataagtatattttacatgggtgttcaagatatgaacaagcgcaattatggaatactagtcgatacaccataccggctagtactacaatataggcataggtcaaaaattattcgtgactttcaagattcaaattatttgcacgagtttgtttcccgcacataattgtttcaaactgcctttcagagaaacgcgctgtttgagggtttcttctcgatcgattcctatgcaacgaatgtataatggactaaccctttgaccatggcctccttcaacacaaatgttgatcatagtgaaaaccgagcaacgaatatgaatgtcattggttggttcttcaccggcgttgcaatcgcagcagtttccttgaagctatttgcccgaattggtagcaagcggtttggctgggatgatttttttatttttttatcgatggtatggagcactcccagatctccctagacaagactgacattgtggaaattgttatgtaggctctcagcatcattgccatggcactcgtctcttattcggccactcttggtctaggtcggcacactgcaactgtagttgctgaatatggcattgagagatacgaaaaatcagcctactggcagattattggatttcctttcaacattggtatgtttacttactcaatagagaaaatcaagtactaaaaccgagacctataggagcgtttagcttccccaatatctcgattgccatcctgatcgttcagctgcttgaccccaacccacttcgtgcaaatctcttatacgccatggttattttccaggtcatattggccatgatatacgttttcatcgtcttttttcaatgcaaacccaccgaaaaaatgtggaactcttccattgagggcacatgttggagctcggatattttcaatggcttttcgtatttggtcagcgcatatacaactatgacggatattgttttggctattgtaccaatttctgcattctggaaactgcaaatgccgttttcgacaagactgagcgtctgcattatgatgggattgacactgctttccgcggttgttacgattattaaagcaacatatttgaacttatttaccgaccacactgatcctcgttagtggaccaccctagttttgttatctagctaacagctaacatctggtagttttcaaggtggtgccgttggttctttggggagtgtaagtattacccactgtttaccaagcctgtgctaacttgcagcttaggattgagcaaaatgttgtcattgtcgccgcttgtatcccgacactccgccctttattccgcaaggcattcgagtctaccactggatcctctggtgaagccacttcacaaagagaaacgcgctgcggcttcaaactcgcatacagttccatacaatctctctcgaagcggacattatctgtgacggaattacctcttaaggacaggcagcaatcctatgatatcgagagtagtagtagccaatttggcatatggcggacgagagaggtaatggtggaaagtgacgacgataggtctttcgaacgcggcgttggaaggacagataattcatttaggggattgtcacaggaaccttccccccttagctaattcgatcccactactccgtactagtatatgcattctagtttacatggtgaaacaaaacatgcattttgatgagaaaaattcgtataatctacctgattactataggatttagcccttgatggtaaagcggttgataaagcagttgatgataggacaaaagttgacttaatttgttagtggtttacatacaattataatctcccagttgatttatcgataactccaacatgttcgcggggacaggctcaaggaatgatccgatcgatttgaatccaagtcctaaaaccagtcaatcgtgcagtgagaattcgaggccgtcgacaacagtatattcttccacaaaaaccggaataacttcgctagataacgaatctggtagaacacggtatgatgcgtcttcttcttctacagataagagaaatgttgaagttgagtatttaaccttacttccggtcaacagctctatcattgatagtctcttagcttcttttgaagttgaaaatagcccgatatcatcttcgcgtccagtcgatcatattgttaattagcccattgacattaactccattaccacattaggagtcggatcgactggtacctctgggctcaccttctttatcatattcagcgtcgacttcaccctcacttacttcgactgttgtatctataaggatcgaaattccgatcccatctcgaccgccctatgatccgtcagcatgtttatatctagtgtgtattcgacaatgggtaaggatgccactagatgatactgattgtatatgattttgaacctttatatctgatctagaaccttttattctatcagactggtcatatggcgaagagatagtagttatcgcagtttctatcgaagaatatcatctagtcgacggcctggaattttcactgcataattgactggtttcaggacttgggtccaaatcgatcggatcattcttcgaacctattcccgcgaatatcttagagttattaataggatagctaattggtatatgaaccataaaacatagataaactgggagaatatcgaaaagaattaaatagtaaagtagtatgaaagtaattttatatgcattgaaatgtatagaaatcattctgacgtgaattccggcatgttccatcaagtgagtaaacatttttgatggggtggccgccttcgcggaaattgcaggcagaaagctaaccgccattatatatagcatgttgattgggtatgagttatagatagtcttgtctaagcctggtttacagatttatgttatggatgttatggacttatggaatcttatggaattatggattatcttatggattgtaggtacctgatatggggagtttgacataaaagcggtgtaaaaattgaaaggcggtataggcctcgataagcagaatcaggtgccgaggcagaatgtatgcccagttaggaaggcggtatttgaatttcagtcagggcccttattttactacactcatctttatcatcacccaaccaactacaaatctattcttttctgccacaagaaccaaatatgattcggcatccacgctcggcccagcctgaccccataaccgtcgaaatcggccaggtacttgcacccctggctgtctttccatggggaccgcttgcaatgcactacttgggtgttcctattgtaataggtgttagtacggttatcacttattggtattctagcgtctactaatcaagtcttataggttgctatgatcgccgttcgtgatgaggactatcagacagcatgccagaagctaaagcacctgggattctatgaaataattcctgaccgcacgattctccccgagatattggcagcgatcccagatccagatcaagcaattgaagaggttgcgaaggagtatcaacgtctggataactcaactattacgttcgaatatccacccaatcacgacctttctgggagtctacagttgactttggccccaaactccttcacgaatcttcaggtaccggatatgaccggcaacgtgcagcaagaccctgtctctaccacgggctacgacatctacggcaatatatgtcacccacttgaagaggcgttggttgaaagttacgtcaggagcgttattgacgatgagaatgatcagaatgagttttctggttggggagatagactaagcacctgggtggctatgatgtgtggatatcttgaggtcaataacgatatcctcgatagatgctcggatgagcgagcagtggaatggtttagtgtgacctacggtcggatacacgaggaaaggttcggtcccttggatagacgtgtctcaaagcgactaggttccggaagggaaatgccagtggatatgaggggcaacctgttgcccacgtaaagtcgggcattttctgtatcatacggtgtggcgaagcagatcaaagcaggtcatttacattttatcaaagtctacacaattagaaagcgttcatgaaatcgtctgttgatgcgaataggccgagataactatagtccggacccaagacctccatatcaaaatgaaatgagagggcctaaaagcaggcaagtagcgctaatgtttgacgtaatgaaaagcgaagaagaagaaagaagaagctcaagtgcaaccgcaaaaaccccatgtctagcaataactgaagtatgtggccgaaatcaggaagggagacattctctagagaaaatgaatattagtaaaattgactttataggaaatgaaaataggttgagtcttaccaattaccgaagactgaattgcatttgatgcttcggcgaaggctgctgtggagacgggggcgttccctcagaaggcttgctaaggcaagttgcaattgcgcgtcttggtcaaaattgagttctggtctgttgggtacacaatatctaaccaaccgcgcaatgtcttcgatatcggtcaaatgctttggaccctgtcgctggtactgggataagatcttctctcgcgtaagccattcagctccgaagatcttcacgggatatccgttgatagtcctggtcacacgtgtcgccgtctgaatattatactgcggcctttgtggtcagctagcgtgatcgaaaacctccaactcgataagctgaatggtgccgcttggggaacgtagtctgaatgccgggatcacatgtccgaattggttgaccggtccaaaatcagcagggaaagcgttcagcaatcgctgtgtaagaagatctgcagttatgtagcgctggtcgacatgaatgactaaatccacatcttctgtccgccggctgggatgtggtgccatgaaacataccgcggcacctcccatgagcgcgtagtcaatttgcaatagatctagacattgggcaatgcgggagacgacggtttctaactggggtagaagtaggccacgcattcttcaatcgttctctaatatcacgatggtcagatttggagtgggagagtgagtgtgatttctcgtacctctgcgtgtgcggagagtcgctgtgggactagaggttttatgagtaaagaaactgatgcaatgagatgtgcgcagagaaaaggtaagagaaaggaagagcagatgagcaaaaaagcaggatatgagaagagcaggggagcggaggagcggaggagcgaagaaactgatctaatgagatgtgcacagagaggaaggtgaagggagatgaagagagagggagagaggaagagcagaagagcaagcccggtgaggagcaggcaggaaggctgcctcaacaactcctcgtctaggtagcgcaacccttccacatatgattttagagaggtcatagtaagagggatgtcaagaatacagcggggctctgaagcaaagtaaattacctccctctcacctctgttatctctcacttcagttacctcttatacttgagaataagtttctaggtatggatactatgatttctatcattctacttgtctaatcaacatgaatctactatcaacttacggatgttgacttctcaactataagagagacagcacgtagctgggtctgtgatattcctgaaggaatttcatttgaggccaaaggatattcaaggtttcttccgatccacttcggcccgcttagaggaactaggtcccggcgctatttcatctactaaagtggggtctaaatcctatgatgtcgagagtagtagtagccagtcaggcatatggcggacgagagaggtaataatggagaggaacgacgatagatgcgttggaaggtcacaattcatttgagatccaaactttctagcgaagactacagagtaaaccacctagaaaaatggagataattaaatttgtatagcccaaaagcttcatgttcatggggtcatcgggcctggttattccgtgctggctgtaaatcgatgcataaaagcggttaaattcaggccaaatttcaggcattaaagccctaacgtaattcacaagcgagtgacgcacacaagcgagtgacgcaccccacccaaaacgcgtctatggtttagcacttagttaattcaaccacccaccatgccaccaattcgctctcgaagctctcgaaattcaatagagcaagaaggcaggatcttgttagctatccaggctattaagggtcaagaaatcagttctattcgtgaggcagcacgccgattcgatgtgcctgaaactacgttacgtcgctgtctccgcggtgttacaaaccgcgcgacttctcgcgctaactcacataaattgacagaaattgaagaggaatctcttcagaaatggattctctctatggattctcgcggttcagccccccggccctcttcggtacgagaaatggcgaatattctcctcgaacactgtggaataaccccagtcctttcagttggcgaaaactaggttataaactttattaaacggtaccctaccctttcctcccgattcttaagacgttataattacaagcgcgcgaaatataaagacctaaggattattagaaagtggtttaatctagtttaaaaaaccattcttcagtatggaatcgatccggacgacgtttataacttcgacgagacaggttttgctataggattaactgtaatagctaaggttataactagaagtaaatactacggtcggagatcacttttataacctagaaatcgcgagtaggtaactgtaattgaatatataaatacagcggggtaggccctccctctgtatattatttttaaaggcaaggtcttctttaaatcatggtttaaagaccttcctagcgactggcgctttaaagttagtctaaataggtagatattagataaaataggcctccgttagctataaaagctctttattctaactacttcttcttatataaaaggggtatatcggcttttagtacttaacggccataaaagctatttaataccaaagttcaataaaatttgcaagtaaaacaacattatactaatttatatactaccgcattccttttaccttttataaccacttaatatcggctgttttatagtattaaagcgggtatacagtcggctagttaaatcaaaaatataggtcgggatcaactatattaataaacttaacttcctcaaagtatacccccttatataaaataaagcttttaaactagagacaattaaaaatagcttcttagcagccggtttagtaccgtttttacccaatcgggtccttttaaagctaaatattcgtcttcgaataccaactccccccccaagccgggatagcgattaggaccctaaaataccttcaaactacattcaattataaaagcaagctttatcaattaaagcattgcttcgtataagatcaagaagccctccgagcccgctcaattcggctattaaccaggttttaaaagcctgccagattactatgcaatctaccgtacttcttgagaaagaagtaagcgatttacgggctactaacgagaagcagaagcaaaagtgtactagatcccagaggcagatacattccgaagaaggcctctccgttcaggaagcttctcaattgattactgcgccggtggaagtagctgaagcacccccccgcgctcagcgaagaaggccttcgctacctttacagccaagaactagggctttaccaacgtgcgggctatgtaaaactcagggccataggagagatacatgtccaaatagatgatgattttagtttattcaatttaatggcgttttggttgggataaatacattcaaaattaataggttgggtagggtgcgtcactcgcttgtgtgcgtcactcgcttgtgaattacgttagttaatacggtgacaacgacccctctcgctatgttatattgtactttacgactagaaatatattccagctacttgtttagagcgtaatatttgcaattcgtcatcaggtaaacataattcaggtttcgcggcatcgggaaacctgcaccaggcatatctcatcagtatatcggtccgagtctgctgtctgggacaactccaagctggagggcgacttggccccttttgtgctatctccaagttgcgagaatccaggctctttggtatggcgtggagtactgctataccttgaacgaggttcttttgaggccgaactaccgacgagtttccggcctaggattctggaaagcaaaggccaaatggaaggaaggcaggcagcaattatgataacgccactttcgagaattgtccaaatcccaagcttgacagaagtccctatcgatattagctgaggttgagcgtggggatcttgcatgacatacaggtcgggtctgtaagagcactttcttggaaaaagatagtcatgcgaagaatactcgcgacgttcccctatcagcagtgtcagaatccctccaagcagaaggtcattgtgaaaactcacaaacttcccagaaggaagacgccggttaaggctactttctggccaattcgggtgtgaagtttccagacatacggcagcggcatcaccaagatcaaaacatcggtcatgatattaggaagcgaaacataacggtagaaagcctcttggttgaagcatgagcctccagcaattgttctatcccatgtgtatgcgattggcgaacattgaaaaatcgccgcgagcaaaactccaagtccatgacctagcacaattgcacccacaatataggcaaatattcgaaacatgcggacaggaaataggcgcacgtagaagaggaggatcgaaaccttagcgggcgctatagtgaaaggaaaatcgaggatttggtttgcgtagagaccctggataaaaccgattagacattgctgagagcttctcaagtcaaattatgacaaactttttgtaagataaccaattttgaaggagttcgcgcgacatattcgaggtgataaccgactcctccccgcttgaccactgtacatcgtgatatcagtatccgatcgccaatatactgtaggaaggtgcgtacaatagatatagagtgccgattgtgctaaactagcaatctgtttttcttgttagcattgtgcaggttcacgaggtttgaatataggtggcgattcataccaacgctgggatcattaaatagtcatcgattccgtttgctactcgctgtatatgcctagtgtaaaaacgggccccgacgataatgatttgaatggcagcaatagcaattgagacaccaatgagttgttgtccgcaatatgcgacagtgccagtactctctgccattgttgatcaagcgttcaacatgtcgcttgcgagtattcaaggcattgcttgaccaattggctaggtcgaatttttttcacgagaaaacgtagaactcacacttaccccagagcaaaatgaatcggccaatataagttgccttgcttactttttggtcatatacttggcctcgagttagtgggttgattagggatttatattaaggtgtcatcataatgattggggccaaaacaggttacgtattgatttttagaactgtaacaaattaacaatcctgctaagcgagatgcgctctttgaattttgggagagtgatatatgctttgccctttgactctaccatcacaaatcttgaaagcacttttgatttcacaatggcattcgcatcggacggcgtgttgaggagaacccatcgcgctatcgagagcctagaacacggctacccaacacttccactatgtttaggtttcaactattcctatcacatcgttaattatgctattgtgctccatattgctaacaatgctgcttctaagaggccgagcactcgaaatcctttacaacatatcttccaactccaccgtgaaacctgattgaaacctgccgaaggaaattcaagcgtaactcgacaataaccagactggctagttagagcctctttatcagagttttctatagacggcagtatattgtaggcaataaatgcaaattcaatttctcgtataaagcaatcggggcataaaataatcccagatctcggccacactagttcatcgagtggacctgcttgcttgagcacggttcacacggttcacacaacgggatctcaaggcccatatttgtcggagagcccgccccgtgtacggagtatgtagcgtttatgtactccacgggataacttgaatgctctaagatatcctttcgggaaattctagaatttctacgacaccgcaagaaaatccatcatgacccaggatatggacacatctctctcggcacagatcgctgctttggccgatagtgcgcagactcgaggcctcgatgagcaagcacgttcagaagcactcaatgctgctcggcgtttggtagctgctttggagtcacccgttgagagaattattcaggatgtagtgatggtatgttttatgtccgagacttcaattcacagcccctcattgcagtcttacgatgtggcttttgaattaactaattctgaatttacagcactccccagctttgatggctattcgtatgggtgttcagctgggaatttttactcagatcagccaaaagccagaaggcggcgcttcatctccggagatcgcagagaactccggtgcaagcttggttcttgttggtaagattggcctatccgaccgtcgtttatcaatgaattccgccattcccctacattaacataaaattatcatattcagcatgaaattatacttgcaatagactaaatatctaatataaattctctcaagaccagattactcggcttctcgccgcgacgggatatatcaagcaggatggagtacaacacttcaagccctcgcctcttaccatggtgatggcagacccagtcatggaagcaaccactcgagcctggtcagtgcaatttttgatttttttcccatctatgctcctaatcggctgaagcttttattgacaacacgtagctttgagatcggcaacctttgcacttccaaagcaccagagttcttccgcaaaaacaataatcaattccctagttctgccaaggatacgcctttccaactaggatttaacaccgatatgaactatttcgagtggctgggccacaatcccgatctggccaaggatttccagcaatggatgacactaaagcagaagactacccttaactgggttgactggtttgacattcagcgatcaatcattgatggctccagtggcaagcctgaggatgtccttctcgttgatgttggaggtggcgaagggcattatctacggcaattccgcgagaaattccccgagacacctggccgtttgatcctacaagatctgccgcaggtagtttcgaccgttgagaatctcccggaaggtatagaattgacgccgcacgactttttcactcctcaactagtcaagggtgtgtaatgctagaattgcatagttatcgtgcttgtgctaatgattgtcaaataggcgcgcgggcatacttcatgcactggattcttcatgactggtcggacgagcactgccgatccatcctggctaatattgtcgatgctatggagcctggttactctcgtctgatcatccacgagtccatcctcccggacctccactgcgatctgccgtctgcttgtctgagcgttatgatgatggtccaggttgctgcgtttgagcgatctgagaaacaatggagggatcttcttgcgtctgtgggactgacgaaagtcaccttctaccagcctcctggaagtggcgaaggtattgttgaggcttttaaatgatttagggggtatgaggcctggtattggctcaaaccggggtgacaggggtgacagtcaggagtaggtttcctctcacttgactgatttaggtataagggagtgggtgagggggaaaagagaacgtagggacaaactgagtgagaaatgaaggcgaggagtgagccaatagctgcagcgctctcaccctaaagtgatcttatacttttattaatccctgggagtgctagaagacttgatccaggatataaatactttaaaatagatggccataagtggcgccattttcagccgcctatctgccacttgctgtcgctcaccgtgccccctgcactcacgcacggtgaatttaacacgccgcagtagcttcgtatacacccgtcgccagattatctctcgtcacgagctggagaagagcatcaaagacgctcaacatcacccaacaaccactggacatgacgataagacattcggccttgatcctgggattgtcgatgacccgcttggaaggtttccgcaaacatcagaccacgttcatagtgctggactcccatcaacccctgtggaccatccaaaccgccataatcgtcttgggcagtgaagaccggagcgtattgcaagtcggacgtgtcaatagtaatgggagtggtgggacgagtctggaaacccagctcgccattccaggtcatgttctggatcgccagcaacgttccattcgtgatgatcagatagtcccaatctccattcgagatcaagacccgattagtcgcctcgatcagtcgcggcaggacatgctctgtgggattcgcagactcgtcgtactgttgctcgggccccgggttgacgcccacaaagacgctttcgatgctacagagctcccagtcgatatcgagaggaacatgcagagcgctcttcacatccgtgcggttgaaataggttgagggaccgggttgataggcaaggtctgtggggaagcccaggacatcccataagagtggacatgtctggctgaccttgtaaggactccaacatgggttcggattataagcttcgaaataaatcatgttgtagatgtcgcactcggagtagttcatttgtttggagggttgcactccagaggccggataggtgaaatactcctcgaagtattccttgtaaccgcattcttcgtaggtagcttgcagctcccccatgtacgattggttaaagttgaagagctcggcatgttgttcaacgaaggggtaggaggggagttcggcctggatataatcccactggccgatgcacgcatcatacatcagggctcctagtatgggatgagtatgtgcgaccgatataatgcagattcagggggattctcaagtcttaccgctgaggttgaagtactcggtatcattcttgtcgagcatggcggcggatatgaagggcacgtaccggcccgcataactctcaccagttaagaagattcgaaagttcttaataccgtatgttttttggaactcttggaaaaagttgacgaaatcggcagcgatgtcctcctcgtcggttgcagtcggcgtgccgtttgagaacccaactccaaccggttggtcgaccctaaacacctgtcagcttatcaagtacatcctcgggtctgcacacaaagaaaccattttactaatgacgtaccataacatattggttaaattaacccatgagtactcattgatgacaggttcgtaggtaccaggttgccaggtgaagcgcccgttctcctgcagaaacccctgcattgaactacatcccggtccaccattcagccaaattgtaaggtcgtcgcttggttccccgatcttcggctggaatatatagaacaaggaggcatcgtcacggacagggataaaccccgagtacatctctcccaaatcgaaattaacgtccggtagactctccacgacatgggctgtggaaacattatttgtcagccgtggttgaaggaatgggtaaaggattggagtaaagcatacatttagtctcgttagttaaaaatcgatagtttgagggatcaattggttcagactgctgggtaggacgcgtagaagggcctcgagtcggctgtcgtgcttcgttgccattgatcagcagtgcgatcgccagaactgctgagatcgatcgaccgaacatccttgcagttcccttatacggagtagagatcgagtgttcgcaatgcaaaatgtcaatcggcccacttgggtagagctaaggagaggctatgtactcttatacccctatatgccggcttctctcgtgtttgcatgacaaacacgctttggtatttcttccgagatccttcgatatgagatccacttttcaagggatcagccgtgctaataaaattagcggctgttgatcacgaacagaccctcttttgcccacttctctccactttttgcattttaggtaagtgtcgtccggaaatgagattcttaatgggtattagcatcaaacgctagaataccaatgattcattgtggtatatactaagtctcgtagcacatctagttctaatgtattaggaacattgttatgtattcgagtgtacatatactacagcataagccaattaccatattgtattagataaattgttaataaccctaagcttaaacaagcaatcaagcaaaagccaattcgcgtataaatggattaattaccttttatgcaatattattggtcaatgaaagcggttcccctgttccttctccatatctgacccacctgtgttttgaacccggggattaacttacggggtttaacttacagatccccggcagttctttcccaatttaccaagggaatgagtctactatgtaactactaaagcgatataggtgcacgaaatcagtagttgggaatgacattggtacctagacagctacaccactatatagctacagtacttcttccttgtatccgcggagatggctacaaacaggcgaccgggggccggcggaagcgcagtgccttgcatatcgaataatactaccgtatgtattagaatacaacagtctatacgaagagatctaatcagattgtttagcttataattagcatagtacttggctaattcggtttttgttacatattgaaagcaagttaatgtttcgaaagcgttctcacctcgcaatggatacatcgtaggaccgagaaataacttctaacttagcatctagattgcgtaccatgaagttgtataatacagaagagaatattcgagcaactccacataacacgaaacagaggttcaaccgtaggacgaagcttaattagggaatattcggtagatctctgcgctactggaaatgaattccacacgcgtacgcaggacacagactattgtatggaccttgggggaacaacttggaataggtccactattattaatgctttgctaatcgattccaagccttggaaattccaaagtagacgtttaatatttattggtaccttaaaacctgattatgatattgatgcggcatatacggagtacggagtacggaatgctaattttccatctgggcatctttaagcgggccgttgtcggatctgataaaaagagaggggcaaccatgcttcatatagtgcacaaagactttagcatagtactccgtacatatcatcgatgttcagaagccccttttttcataactaatttaaaacccgactgattgcattctatgccctactgccactgataccagttccatggtataccttagcagtttcgacactcattttgcagtatctttaataggggcgagctgaggagtgtattagggttatctttgagctgaatccacgtgactgaatgtcagctttctatccatgattcatacagagtgtccgtgctttgtacaacatacttggattcagcatattctccgtatagatgaaacttgcggccccggagttgcccgcggccgaggtttcggggcttcgggtcggagcaagggtatttaccagatataaagtgacaagtggtagtagaaggcgaggtgcgttatagagcttatggttatcacggggtctgaagatgcttaattaacttgttcattataatgagagtgctgctctggtataaggattaaagaggtgccaagatataggcaaagaaatttgcaaagtctaagtgtgtgtattaaagatcgctaacaaccggtaaagaaaattctgcactgcctccacgagggtggttatttttcattttttatgggtcttctttatttacatggaattatatttcgatgactacccaggtgaactcagcattcaagacatcaaacagttcctgtcagcttttcgctaagttgtgttgattcattagcgttataattaatttcttcaaatccgagaaagaagagaagacttaatcaaagtaataggccgataaccttgttgtcttcttcaacagacaagaaccgaatggtcataacccaggtatattcaagactaaatcgggcgttggagactaagagcaatctgcatgtttgttcttctccgagccaccatcatgatgttcctgagttgtataattgatttactacaacataagctgtgcgtggaaattcagctctaaagcgattagtttccaacaggcagtgaagccgaggaagccacgtaacccgattcttcatagtgagctctatcaccctcctgttctccaccttttattcgcccttgttagttcttctctccattgctgctctaaaacaagagggggccaaatgagagtcgaatgatagtagatcggagagctcttgcccaggatcagcaacggctgtccgaaacgaaatttcacctgttggcttagggagagaatgagacgaaggcgggttagcaatttcggtcctgggtgggagctgtgcaaccattatgccagtgctagtgctacatggtggcaagcgggaagcgttgtatacttgctgtcgaaacattatgaagtcattcgttttgggcatggttcataatttctgtaccttgggcgaaagatctgagtttcctccaaaaaggaattcgcaaacacaaatcacctaggtacgtcctacggcttggatctgaacgatatcccgggaaccatcttcgatcttgaggctgatatctcgtttgctcgctcatagcaactcaacttttgatggttgtgagtaagcgggtgaagagaagcataactagttaaaataaagtgagggccaagtgaaagtgtttgaggtcacgtggcctctcgggcatgcttgaattggggactgctttcgccgtgaccgccttcgggcaggacattcatagaaaaagacatcttaaggaatagccgtctgatcatccctccctgaccccatatctcggtaagacggctacaagcacctaccggaggatctgcgtcttcattttgtttccatcggatttgagagaacttccatctcggacttcgctgagacttgaggacatacagattcctcctgcccgttagaatagttccaagtagagcattcaaatgtctacaagagtgctgaccctactggtaggtgtgggtcagacttcggtctgtcagatttggtgaccgacgctgggatttcctgaccctaggagagaccctgatcctctgtgaaagaggaactcattgccaaacagcgcgatatcatctttgaatggacagataatcatcgtctcgtccaacgagtccctcgaaaccgctgcagctggaagacatctggcacctagctgctcagcattgtgctcggcggatattgcccatctggcagatactgcatacttcagcgaggtacggcaggagctccatgggaccgtgattgccgattcgagcgcgccttcccctcagtcaacactctcaacaagtacgaccggtagtttctcttctcctcctcaggcaaatcgatattttccagagcacacgcattcttcacgcagtactcttcggatgtctccaatacaactacatcgcaggcaaaacaaccccagctttagtggttgccgaccagccagcctgttgcatagtcgatcgctgtgatgatctaacgattgccgttcagagtgggcggcatccgcctgttcggacgatggggaattgatctcatcggccgcttaccgaccactccgaacggcaatcgttagatcaccacggcgatcgactatgcaacaggctggccggtcgcccgtgcagtcccggacgcaacagaagaggttctcacggaatttctttaccgcgatgtctacgcacattacagagccttcaacgaattgctctccgataatggcccgaacctcttgtccggcgcagtacgacactttgcgggcttgctgaaagctcgccaccgtacaaccactccatataatccccgcactaatgggaaagtagaaaatttcaatggtttaatcggtcgcacgctcacgaaataccttatgggggaacccacgcgcgtgtgggacgagttcctcacgaaagcagcgcaatttatttcaatatttgagtgtaagaaggaaggagcccgggaagaatggtatagcgatttcgccaagcgagctcaaactgaggacgtgggtcatcctgttgattggctgcggactttatacacgaggatcagtgtgcaatatatggtattcgaaatggaagatctttaggtaactgcagataagatggaaaaagaccgggtggctgcagaacagttgggagaggagaggccaaaagccgttgtcccaccgtctatctttgatgtaccctgggctatgggccgttaaacagtggactagttgatatagtctggctattgatactcgttgagattgtttctgcctcagataggaggacttcgctccctgactgtttgatcttcctagcagttagctcgatacaacccacggttttctttgcctgaggttttataccagtggagcttgaaacccggtagtgagacaggtcaaaatttactgtaggaaaatccgatatggtgcactgaaggtgtattaagaattcactaatctgcagtaataagaagtcagagccgaccccataagagtccgtcttcttcttcttcttttttttttttgagttttcttcatttacaagcgtatcttcatgaataaattccaatgtcacagctcaaatctcctcaatgacatccttcagtacatcgaaaagctcaccggcctgcttctcattaccgagctataggatcattcaatgttagtattataatcatcaaatcagaaaactgagaaaaatcgaggaagataagacttacccggagaagatggctcacaaccttgtcatcttcattgctggcgagatagatatcccgagtggatgggcgaaaacccttgatatcaccaaagggcatggtcttccaaattgcactgttcatcataacacgcaaggcaccatcggcgcgcatgataacgcggccggatttctttccatcgggctccgtcttgaggttaaccttgaaggtgccggtaccacgctccttccatttcttgtcatcaaagtagtacagcttgcccttggctgtaaactcggtggtctcattttcttcgccggtttcaactttgtcatggggtgagcgactgtccatcttcggggtgctggggggcaaggggggatccataccagtttgtgcgtggaatcgctcgtcggtcttctcggcgacaaaggtgtcatcgggtccgcccgctggttccttgtcactttcttccttgtcgggttgttttgcaccgagggtcttttcactgggctcgccaaaagaaacgggggcattaggagacgcgaaactggtgagtttaccagccgttccaagaaaaccgacgggagcgtttgccgatgcgaaactggtgagattaccagctgttccagagaaactggcaggggcgtttgcagatgcgaaactggtcaatttaccagctgtcccagggaaagcggcgggggcattgggagatgcgaaactggtgagtttaccagagggagcagggaaagcgctgccaaatgcagagaagccggatccgagggcaccgaaaccagcagttgaggcaggaccggttgaagcatcagatggtttatttgcaggcattgcaaagggtgaaggtgaggtagcagcctttccgaatgcactcgtagtgaaagtctgttaggaactagtgttagtggaagacgaagaaaagaaaaacttgcggaagatgaggtagccaactcacctggtccaccttggccttgcgctcctccgaattgtcacgaggtctcttcttctcgggttgtccttcggtgatggatttttcgtctgatgaagttgtctcagtcaagccaggcgtggggtcagtcgcagcgtgggaattctgtgagacgtcatcttcaagttgttctcggctccgtttcttcttgagggtttgtgaagaatcatcctcgtttccgccggcggtcgattcaagattctgtgggaattgagagtggttagaatcaggaagtccaagcgtgggtctagggtaataggggtgcgttggactgtatgggacaggacgcggagagggagagggtgagggtgaacggtagtcaggtagagagggcgagggagaagagtagtcaggcagagagtcttcatctccaattgactcggggttttgagttgtgtgagatggagaatcatcatgtatgtaggattcagatgaagggtgggaagggttctcgagagaagggtgcacaatagagggcgacccaggggaagggtgtccgggggaagggtgtccgggggaaggttgtccgggggaagggtgtccgggggcagggtgtccgggggaagggtgtccaggggcagggtgtccagggaaagggcttccagatgaaggaataggctttgcagaaggaatggtgtcacggatttcggaggattcgccttcagcggatctcgaagtcgaggaagccaaggtgaccgctccagttgtcaccttgataccaacctcaacaggaatggtcaaatggctaacttgctcggatccgccaaatgagaccttgatctcaagctccaagggaaattggatcttggtctcggtgatgaggctcatgatcgggttgtgggacaagggtgtattgcgaaccgcaatgttcgcggatgatgtggccagcacatcgtcactcacatcttgggtagtggcatccttgggtaattcggcgtgattggagttgtcttcactgtcagcggtgttcggagtacactctcgggatcgcttggctgggggtgtgtcgtttgcaccatctgtgttgtcgaggtagcgctttcggtttgcacgtgcagaatcgttgtttccaccaacagcatcgaggttagtctccttgagctgctgtcgcacggggcgttcgccgctatcattgtcggaggggggcgactgcgcggtcactatcaagattgtcagatcacatgaacttcggagaaagccctacggcagaaagggtattgcagatataagtaaaagctgcagaacggagcaaagaccgatcgattaaaacgtacctctgtggtccattttcagttgctccgtttccaaagctttggaggttgtcagcgaaactgcccaagtatgtgggggaggctatgcgcccaagcgctgatcacataccacctgtggagaagttctgctcgctagaagcagaagccatggcgtcacgtcctatagacaagcttgtcaaggatattggtattggattccagatatccggtcgagattgagttgggcggagcttaaaccaggtcacgataactgcagataaccggttcggatcgattgggaccagccgaatcgacgaaggatggaagatttgaagtttgcgaactttgcgaacagaagaacgagaggatggaagggtggaaaggtgagagaagaaggaaaatctagcttgccggttcttataagttgaccgccgggtgcggggcccaacaaacgggttctctgaatagcaaagcgtcaatggaaatggaaacaaagcatattcatctaaatagacaattgtctattgttgcctggtgcctgggcagatacaattcgcataaattcaattcagagtctggatataccggtatccgcgctattctaatacaattcaatgttattattgaggttgcgccgatgcctatcagaggcatgtgacggcgcattgtctcaactcccaagcacaatatcacaatagagagccttaactgatgaaacagagacacccgatcgcaatgtagaacacaaacagcgggtacactgcgatgccgactcggttccgcaccactcccgagcctcccaagatgcttactccggctgctaaagaccatgcgactaatacaagatatactggtatccgtgcaatggtaggaagtcctaacgcactcagcatcgcggcgatgaccaaggggaagagcgtatatccgataatgcaaatcgactggaaaaaggaactaacacgcccaggccgcaatgttagtagactgcgatgttgggagatgattcgtagaaaacttacatcttgccaccaagaagcttgatctgaagagtcacagcagcttctccgatccagacaagacagaaaacgcccgagaaaaccaccgacgactgatcaccctttgcgacggacaagaacaaactcaggaccaggcaaaagacaagcggtcccctagagtacttattagtatttttcagacttcccgtgtgtaaattcgcttaccagagatcccagtcccgcaacccatcgctcatgccaccctgcaggaccacgtcggcatccggccagcgtccaacgagtccccgaatgttaccaccaaatccagacactccaccttgctcggaatcagcggtaccactgcccccgcgctgcatcattcctccgagcaagtacttcggccaaagcacctggcgcatcttctcccacacggcaaccaagtcgcgtgacaatgtctcccaaacactctcatcgatggtattttgcactgcacggcgatcctcaccaccgatagaggacgttagatagttgccatagccagaggaattgcctcggttggccgagctggattcgatgttgcctcgcagaggggccgtgtcggaggtattgtgcagggggtcgtcagcgtcgatggctagaatcacaccgaattaggatcttgcggatacagtggtaatcaagagggcaaagaaaaatactcaccatcatcggcttcgatcaaatcatcaccaaggagagactcgtcatcatggggctcatcatggggatggccttggtatacggtagccatggttcgcgtggtatggtcgtgatggtcggaagtttaccgcaagaatggcacttcctttagttttagtcctctcagaggcgaagtcaacaggaaaggtcaaggtaatcggggagtatgaaagcaagttagccaagctgtcccggaaaggctagagtggcattacgtactgggtcacgggtaatgttaccaggcacgttatgtttcagcttttacttctacgatgcacttgcatgcatattatgggctttctgatttgaatgtttcaactgccttgaatctccaaaaataaaatgatcatccgatgtcattaatttgacaatcaattttcctcggtatcagcaacataaggcgcctcctcctgatacacatcgtacttgtacttgcttccgatatggtcagccctgagctctttctgtcccttgccatatatcctctcacgggctgtgagagctggctctgaggggtctggaagttcaggataaagaccgcgccgcctcagctccgggatgagcaggtcaaccacatcctcaaaggtgccaggcgtggtaacatatgcaagattgaacccatcgaggtcagcctcttgtatccaacgctccatctcatcggcaacagtagccgggcttccaatagctaccgggccgagaccaccgattgcagccttctcggcaaccacgcgaggcgtccagcgtggaatatccttgctagtcgtggtcaatgcgtcaagcaagctagtgactttgtttgcctccaacgagtctaaagccgtgatgtcttggtccaatgggattttggaaatgtcaatgcccgtccatccgctgaaaagaaccagtcctccaatcaccgacgcgtatttcttcagctcctcgtacttcgcccacgcctcttcgtcggtcttgcctacaatgggcgtaaaggtaccgaagaacttgattgactgtggatcacggcctcgttctgcggctagcttgcggatgttgtcgaccttcggcctcaacacctctggcgaatgggaagagacaaagatcgcctcagcgtgtgtcgaagcaaaatccgatcctgcaggtgaagtccctgcctggaaaaggaacggcgtccgctgcggagacgggtcgacgatgtgtcgtgtgcttaatgagaagtacttgcccttgtgattgatctgacggaccttatccgggtctatgtacgagtctgtttcggggttgggcgacagtgcatcaggagcccaggaactttcccacagtctataagcaacaaccgccgagtcagtcttccacggcatcactaaccaagcttttgacatgcaactcacttatagagcaccttcaaatactcatctgcctggcgataccgttcgtcatgctcaattggagtatccacaccaatggctttgaaagccgctttcttatatgaggtcacgatgttccaacccaatcgaccattggtcaaatggtccagggttgaaaagcgcttagccagcaaaaagggctgctcgaatgaagttgaggccgtgatgccaaacgccagattctttgtcactgcagccattgctgaaatgggctaaccagaagtcagagtctgatcggaatatttggtttattgatactcacaatagtcgggtctgtcaccggccattgcgccgcacgccgaatacactcgtctagtttgccctcataggtatcatgacctccagttgtatctgccaggaacaatgcattgattccgccgcgctccaagagtttcgccaactctatccagtacccgagagttcgcttggtcgcagacttgtccttgggattctatggagctgtcagcattccggcccttcaccttcgattcctataccaaccttccattgtccaggcgacagatgtcccacggtcgacatatcaaaagcgttaagcaagatttgtttcttgccattgccaacggccgagccattctggctagcagttgcactgtcacccatgattcgtagttttcaaggtgaaatatgcttcctttctttcctacgggcagtacttgctcgcgcaagttcgaagcggatcggacgatggtctataagagtgagacgacccctcatgttccaaaccaacaaagcccggaaggacggctctgtccaggggtactacccccaccatcctaacacagaattcgcccatcgacgacgtatctcgcgccatcgacaatgcaaaagaggggaacggcaagcctccgagccctaacaggttggattcttagagctgcatatggcgtgccgtagaccagaacattcgccatcatctccacattaatcacattatcttgtagatatctttaacctccgaatgataatgccggcataagtcatgagagcctatcggaccatttttctcagcgcgatatcagtattaaggacaaaggatagcacgttagagggaagaatttcatcatcggctgtcagattgcgtgacattttcctcgtcaacacccgacttcgcagattattacatattatgttccatttcaaccttgggactggtctttgttatctaaattaagggatagaaatgaccggataatagccggaacgatgatattcgaatgtcgtatgacttagcagtttatataggggagtgtaaaaggctcggcggttttctggtgaaaaggtccgttggtagtagacctacctaccttagtattggccggagaatatatttcaattcttcgtttctcattgggggcttatccaatatcggtatgtctttcattattacacttaatctattcctagccatgatcttctgtaggcttcttaccaaagtcaaggcgactggcataacgaagactcaaggacaaggatcattacaagttgacagcaatatcaaacccctgtggaatcttgattatcgtctcatgttagaagtagagaatgtacccatggtattatgtacaataatgcaaatatgcaacgccatctatatcccccaatgtgtgatatacaaacataatacaatcgaggcctcagcctcgtcctgtcaaaggccacaaatataatcgtgcttctcacaaggaaggttcctcttgcgagtccgcactttcttgctctcgagagttgcgagcctcccactggaattttttgatgcgttcccgggcctcctccttctgctgaatcgtcgggtatactttcttcctcttccaagccgcaatgacgtccttgtcggaatacttcttcagcatcttcgagtcggcgtcaagggccttgcgctcggccttcgaaacataaggcttgtagtcaaggttcagggtgtcgtcaaccaccaaacgaacccgcgacatgatcttcacagccgccggcccggcgacggaatccgaaagcgtgttctggagggcactccagcgagtcttcgactcgggttttccattctccattgcctcgtgcagttggagaatatatggccgtaacgtggcgatagcagctagtctcagcttcgcttgtagctttctgcccatctcatgtagtttgggggctttggtggatttggagtcttctgtgtcgagtcctctgaggtgcaggagaacggacgagttggcggaaaggatctggatcgtttccagatagccctcgaggacgcgaatgtcaggtaggatcaatgctttgtccatcaaaccgaccagctcgttcgcatgttggagaactgagtggttgcggcgatcacggcggcagacactgagagcgacgtggaatgctgttccggttgcttggcccgagggaaccatctgctcccgcatggttttcacactgattttgctggagcgagagatgcggaggaggcggaaatattggatgtaggtgaaggtatcggggtcaatgcggtaatcgtggtcctccaaagtcatatgtttccagtaggcctgtccaccctcagatccttgagtcatggtgaagcatgcgtttaggataagcgtcaattccttgctgtcgggtttaaggaatgatagctcctccgcctggggaacaacaggtttgaagagttctgagaagtcttcctcttcctcctcttcctcctcttgcacttcttcctccgccttctcctcctccacttcttccaatgcttccatcaactcttgttcaacctccacggccgatttgaaattttcgattggtcgattgttctcgtctacgaacggaacatcttccaattctgattgccgcgtagcctctgagacttcaagggcttgagtttgctcgggagttatcctgcgacgggtcgtcttctcgttctcaataggtcgtttttgcagtatagggatccccatggtttgcttgtacaattccatgacattgtaacaatcaatatcactaccgccttccagaagcaagctggccatgccgttaacaagttcgttgtcaatttccaaggttcggttcttccaccgccagatgacatcggcccaaatccgcttgccttcagtaataacctgggccttccgttcaagaatctgctcaatctcatcaggagaccttttctgtatatctctgcgagctgcgaattggacagcgttcaagatgatggtgtaggtggtagcatccggggcacctgggccctcttcgggtaattcaccggcaattttccacaggcgatccatatcccaatgacgatggcagactgtaagcatagcgttggtgtgtatgatatcaagcttgactccagagttcggcgagccaatcgagcggtagacagaggcggcagttttggcaacacccaatgacctcggggctgcgctgaagcccttcaacatgattgtgtatgttcggggagttggtctcctgccacgttttttcatctatgagagaaagtctgtcagaatacaagtccgaacctcaatctcgggcaccaccgaacaaaactcacatcattgtaaaacttgaacgcagcctgcgggtgattttgatccatgcaatattgcagcagatgattccaggcaacatcacatctcaagccctgctttgttccagcacgaaccaaggccgccgccagggccggattaccactgtgcaaaatgcgcgcgacccgatccgccattttgcgagggtcgttcaaccatttcaactcctcgttgataatcttgggtgtgagcttgggcattcctctaggcgggccacgataagtgtcctcgggagcctcgccatcggcctcaatgtcggcctcaatgtcggcctcaccatcttgttcttcggatgccttgtcatcagaggcgcgattctcccgaacctcgccttcatcatctccataatcatacggatcattctccaattcctcgcgttcggcagtctctggatccagagccttgctttcggaagtttcgagctcactgttgtaccgcccggtaaacgaacccgacgcaatagccatcaacatgtcatgctcctccctagacttgacatcctgaaccacccgcctgttatcatgccgacttttaaaatgtttatcgccaacatgtcctatgcggcgagtatcgcgatctctatcggaggagcggttgggataggaggaggagttatagcggcggtagttactggacgcgatccatgtctgtggcagtcgttgggatgcagtagtagcacggtattgctgtgcggtgagcagtcggctgcgcaaagctctgttcacgagcgaccccggaaaccgaaatgtcatgaccgggttactgatctccaggtggaaagcttgtgtcctgcacaatgctataagggagacacggattcaacaggagcgaaatggcaaaatggaaaacacgaagaacagattgttatttcctcatcgcgtgttggagatggtccgctaaacaatttcgcagattatccggccgctagttcatatcgggtctaggcttaatgtctgtatattcaggcatcaattattcctgcctaaggtgtcattcaaccattgatacctcaggtttcttcgaggtccaactagactgcaagtggtttagttcccattccttcaacccatgttccctgcgggcctcgacgggagcgctagagcacatttcccagagtcttctgtgcgtttaaggacttgactagtttactagttcccttggatcggcgttaacatctggacttagcacatgcgctgatccgtggatgaagatatacttccctaccttaaatcaacctatgaagtggacgtaaagcttcatagcactatcacattctctctctcattcattttctattattggatcctcccatccgacgctaccgagccttcattccaagtatacatacatcatcgaacatgatctgaaaatcaaacaccatattcatagtatacccatgcacatcactcactacatcctacccagccatcctcctaagttctaacccaaccggaccataataaacacgacatgcacagcctacctacttgaagtatcacacgacactagtcagaagctaaaaacaacctaactagtggagtccaacagaaacagactacataagcactagccaagtaactaagcaatgtgacatgttaactaactagcacgcggctaggcaggaagaagaagtaagctagaaacgactaggaataactctaaaagcaaaattaccaccagtctcccccacgatgatatcggtggctgatactaacgtccaacacgtggagacgctttactgtagtaagttagttagttagttcctagcttcgtgtcctgtgtatgatgtatgatgtatgtatgttgtacaggccacatatacttgtcttattcggttctagtcaggtaaggtactgtgcgcatgtgtacatatgcagtagttgccagtgcgtacgcacatcaaacggctttgcatggtattgtgctcggtccacggtaagtgccggtactgcttagtgctgatttgggttaggcgtagattgccccgggatgcttgcagtggttcgttattgccaggagtgatttattttgtgtataatactgaggcctgtttgattctctcggctatatgtgcctttttcttataccagtaatgcttttgtttttttttctattttttctcttgcatcatgactatactagcctgcatttgacatttgaactagttagttactaaaaatgtgacatcctttacataaacaattttgagcatcaagacagcgagaatagtgacatttaagctgattgcaaaatgcactagagaggggaaaggacaaaaataaataatacacatcaggttggatgagtccgtggagcataatgtacgttataaaacgaaattgaagaaaaagagagaggagtgaagcgaacacttgcatgtagcaaggttaacacggataagagggaacgggaaacaagactagaacaaagaaccccaggaaaacgattttgggagaatgctgtcgataataaacagatgcaaataatccgccgcccaacccatcgttggagccacgacccaggtaaacgggcaaacaagataagacatacaccacttccgcatcagatttcaagtaggaaatagaacatagagagggtacaaaagggcgccaagccctctcggctcgatgcactctaacacaaaaaggatgacaggtatagaacaaagctggaaaagccactcttagacagatcgggaataaaagccgcagaggttggtatcatagcacgaaagactcgggagcggaagaatggggggtgttgggaatgggaatcggaatccaggacgagaacattagtcaaggacaggggatatcgtgataagaaagaaaaagcaaatgcatttccgtccgtgtaggtccatagcggaagaggtgattatgtgggaaatattattgcggatagtgggcggattgagtctctggaagctgtagcgaatttatggatctgtggacaggacaggtcgaggatgacctagtccagagggtcgatcctggtataaagaaatggcaacgacattactcacgttgcgggtaccccggtccgctctggtagggagagtgagggtagttgggagggtaggctatctgtgcattactctgatagaccataccgctgccaggaggaccaccgtactggccggggacctggctgtctgcgggctggtacccgatcggagggagttgagggcgaactccaccagcgtaaggaggcggctgtccgtgggatgggtcagaggggttcggaggttcgacctggttggcctgggcggcctggacggcagcacgctcacgctcctcgatagccttgcgctgagcatcttcctccttcttgcgagccttccactccttgcggatttccttgaattctaagagagcaaagtcagcagtgagcttaataatgatcagtttccaaaatgggaaatagcgtggacgatgctggctagtgccgggacggaaagggataagaggcaagcttagcctccacgccgtcggccacgctactgcgggccccgcgacacctagtgtaactcactagcgtccgacggcgggcgctaacccgatctagccatttgcgacaagattcaagatctccgtcgcattgaccagcaaaagtctaaaagcaaagaaaaaatgacatgaacttaccctcaggagtacgcttggcgccatgcgattgcatagtcacgtgtgcattcaaatggtttagagtaccatatgccttttcacatccgttccatccacacttatacatgcgctcaatttcctcgtaacgacgacgagggcgcttatgctgctgtgcgccagggattgggacaaaagaatagacctagagtaaaacttcgaatcagctctgatcaaattcaaattccaagccacccaatcttatccccagaaggaagcggttgaggggtagagcacgcggtttttgacgatccctatgacggcggttcatggaccgcatagtcaaaactcagagggcatccaagacaacaatggttgaacaatgtgacaaggcttcagaaatccccccgggaatcatcaaaaacatacctttggagagcgcggccccttgagtacaccaacaggagaggtggaaccaaccgttgtggccggggaagcataaggtcccggcaatccatgatgctgttgtccatagctatgaggccaatccggacgtgcgtacatatgctgaggcggaggtgggtgaccctggtactgcgccatctcatgcccctgaggttgataaggagagtagggaggaggataggtggggctgttggccggaagcgaaggatctataggaacgggcgcgtcagactttgagtgcggactgcgcgggcccgtaggcaaggtgttggtgaacggacttgttgcttgagccatacctggcgcaccgccgggttgggagttgggggcgtaggactgaggaggccggtgaaggtaatcctggtagccaggcgagcgggcggtgggcggagggttcagaccgtagtccgactgaggggtgttggccgacgaaatattggcgggtcgaacctcaggctgcggtgtatactgcggcgtggggcgggcctcgggttgcggggtgtagtgagcagcagcagcagaagtttgttctgcgggtttttgttcagaaggtgcgtcggtgacggcgtttgggtggtgcgaacctggctgtgcgtactcggaagcgggccggttgtccataaaagagaggattcgcgcgcaaagatgccgacgaatctatccagggagatttttcggtttagacctgtggttgaagacgcgtcaacacaacaatgggtcttggggggnnnnnnnnnnnnnnnnnnnnnnnnnnnnnnnnnnnnnnnnnnnnnnnnnnnnnnnnnnnnnnnnnnnnnnnnnnnnnnnnnnnnnnnnnnnnnnnnnnnnnnnnnnnnnnnnnnnggggggggggaagttggggaaattgacgagtcggtccgacacgttccaagcaaggggacgggaagactagactaggttgccacgttgggatcgtggctaacctcttcggacttaggagattggctcacgtacctggtccggttcaatccctggggaattgagatgggatgaagttgcgacgcgaaacactgatcgaacaggtttgcgcacagatgctttcgagataagagatctgaaagacaagggacgatcaattcacaacattcaaaatattggcaattcggatttcgagcgcgtagctgcaaaaaggtccaagagatggaaaagatcaaaaagatcaaaaaagaaggttgatatatcaagattgatgcttaatccttagttcgaggatgccttgcaggtggcggtaagcacgaggcaccggaggcggaaaaatagccacgggagatactaacgaaaactagagactaaagagaaaaaaagtcaggagtcaacgcgacttggagcggcctaaaaggtaaagacgattaggagaaaggaaaggcagtcctcgtgggatccgaggatgctgtggatccgctgggtggaccgcgtaattttggttggcgatatcgttggtcggtatggaaaaattacatcttttatgtttttggatttggtatttctttttggaatatattcaatattgaatattggatctcttggggcacctggaaggataatctacgatgtatatgtatatatataaagcatattggaacatttgcttcaaagagaaaaagaggaaaagaaaagaaaagaaaagaattaaataatttactttctgatctcggaccattccctttttccacacaatactccgatatttaactggcttggccccctttcccctcagtgtcttccttaccggctaagctttccatgtccgtgtgataacacctttttctttttctttttttctttttagtttccagtttttggtttggaaaagaaagaaagaaaaaaaaaagcggaacccatccaagagaaaagtggcaacttgtttctcgcaaaattcttcaatcattcatacaaaaatcctgactatgaatggaagatcaaaaaatggatgtatacaggtgttgttgttttttgctaagggctactggttaggttcccaactggaggcctcttagtctacccgcaactcgggtgcgtcgagggagaacctagcgtgtatggcccgtgggtaccaaccaagatgtcagagaggagccaggggagggcttgagcctgaccaaggtgggcgctaggaatggcgtgcccgaggaacctcaaccgagcgatggaatccaggctcaaaggggtatagagggggagatgtagggagggaactaaggcagaaaagggcgtagcgcaggtcgggggaagaagaagcgatgggactcgggaagaccaggcaggcactcggtccttggtgcgccaataggagaaaaggggtggggctggcggtggggactggagaagctgtggatagaccggactggtttgagtttagcgtcaaagtctgctgcaaaggtttaaagccgaggcggttgaagccggtgatagcttcttttcctgaaaaggaggttcagtgttgcactttgattacagtatggtacggagtatactgagtgtctaaatatatggaatgggaatatatatgtagcggaatatacaacatatccaaaatgcataaacaggataactatctcctacgtactattgacgttcacttcaaacctatcaagtcatggcaacatctcgtcgcgtaaccgtcacgatacctacagacgcgggagtggagacagtgaaataacaacaacaacccccggtgatcggagccctatctccatctcctgacatctggacgtgtctggaaaaaaaaattaagatcaaataatactccgtagaatgattcgattttagaacaaagtcccgttcctacagtctcgatctcaatccataccatgagtgatttatgatgtttctaccagataaccgttgctaccatagataattatagtacaaagcacataccacaccaatctcaccaaggaagaaaagaggagaaagggggcccatcaatttcctagcgggatttccgtggaacgagcccattatcaccgccaattggtcacgaaactcaccaaattgcgagcggagtcctcggcggctctccggtacgatcagtgtatatagtggaggatagtatacggcagttcttatgtatttgaattccctgaattccctgaattagctattttggctatattgtatgttgtgctccctatttacggagtactccgtactccgttattaataatatttactttcagcctcccaatcagagaaagtgggggaaaatcactcagttaccggtaaaaccccaccctggataaaagcgagtctgataggaagaatacgggaaaaaaacatgcacaagatgcaaggctctcagctcggaaaaccaacacacactctctcagtgatgattggcgcattgggggggcgcatctcaccccgcaggcgcggaacctgttcctacactgccggtgaggaaaagggaagtggatgggggttgaagatatttaatagtttggtatttttggatttaggcatttagtcatttctagttagttgattcttcagctacctaactgttacaaaagtaccttgttatcaggaaataatagtctaatagtcgataatgcacaactcaacaccgacaatctccaaacacaccagtggccagtgggaccagcggactccgcgcggacaacacacagtgtctagtgcgggatatccggtgtcgagcgcagaacgggatgatcaatatcaaattcatacggcgcgtcaatcattggacgccgcagccgctcggtatcacagcgccgtatgcatacggaggtcaaccaatcaataataccttggcctgtacggagtcacttcggacgatcatcccaggccccaatttcccaaagctgctggcgatttgtctatttcttatcctattttttatttttctcatttctctccttatatatacatcctccgtactgtaatataaagcgcctttcgcggctgtgctcaaaagggaagagtaccggccaaattaaatgtctcaaccccaaaagttggacctgcagacgctcatccgtgtcacttgatgcacgtgggcccatttctgcatgttgctgggatattgcatattgcatatcgacttgccctgtataaaactttgtacgaatatcatcatatccacttcgcatatttgcactaaatgaggttaaacacgctggctaatggacgggtcagaaaggagggcggaaaaagtacccagatggggtctggagcttaccgttcaatatatgggtattcttttcccagcgctaatcgttcaggggcgatcagtagtaaaggcttgactttgtattctgttctatgttgatcgcgatctccagccgggatcacttttgaactagccctaagcccaagcccaaacaataagaaaccgaaggaagaacaaaattgccctaagttgatggcatacagtagtctaaagtcaatccagaaattgaagtctgtgctcggcagatacaaatataaacgtaaatatcacactcgaactaaaattaaattcaaacccgcaatttccctaaactccacccgtcgctggccagtgctgataagttgcgagactacgccggacacagtaagtctcatccgctaatacttcggcagatcgcgtttgagagacctgtgcggatcaccacaccccggatgatgatcattgagcggcgattgtgtcttggtctttctcgcgaatttgatttgatttgatttttcaaggtcgagatcgaaatgcaggatgaaacctcgggcaaagatattggcgttgaccttgatattgaaatcttgaaatggcaggagactggcatgagtccaccaatgaacgggattgattgttgcagggattagatgccgagacagggatttaaggaagttcagcgagaatggtatttactagaaagtgactcattgtcactatgcctatgaagacacgaaatatattgccagaatatatgcctaaattaatctagatatcgttatcatttcaatactgcaaatcaaagttatgtgctcagtaacagccctaagaccaaccatgcgagcagtgtatgtatatgttgtattttccatgcatgttctacgtttgctctaaacaacacgaaaacttaaacacaagtacaatatactcttctccgtactttctttttaatctttcctttttcctgagtggcgcaccgcactatcgcctgatacagcagccgtcgtcttactagcgcaacccagtacataccccctggtaaaaaattccagggttcgctttcgatctggaccggcgacatgagtcgtacccacccttgttctccgacgatgcgcgtcggatgaaacccctttagggcgattgggcgattgctatgccgccttgaagacggaggcgcttatgcacactgcgggaattgagttcctcgttctactccgtaccggtactttctttgacgctagtctgctgcccgcactactgcacgtcgctctcttaggcgtttcttagatcttgtactgtgttttcaggtgtatttttgtgtattcttcttgtcttgagggtcacttcaatgaagtacggagtagatgttggatgcatacatgtacggtatgggcttatcgaaccatatactctctacagagtacagaggacaaagtacacgcattgatatcctatgcagttctgtttttggtggtcaaattccccgagtagtactcctccagactgtagatagcaaatcggtacttgtgtcagctaatcacactatcctgatatcgttgtgcacgtggctcggtatttctatttattacacctagaatatagggacctgtgaaatcgacgccgaaaatgacagcctctggcgccagaaacggccgcctttccacccgtaactttggacggccagccgccgcttgaccgcccgctgccctgtacagccccctattctgcacccaaccaggactgttagtcatcctcctctcgtcctgttgttggcgcttgacttcaacgattgttcccccgtttccactggcgaccaaacgacgccgaaaatggctcccttctgcctccaaaccaaaggccccctcctttttgcccagcctggtcgagcgcttataagatgcttcgtccgccctctcttctggggggtctttcaacgccctcctctcatctcaactccgttgccttgatcgaccttgacatatttgactcccaaaactcctatcgcacaacccgatccctggccgtttatcccacttctcctcatggcgcctgtgtccatgcccccagctcaagttgatgagcaccagtactggaccgaccccatcctttgcgaggaaactcgagccagactgaaacatttccggagccttggatggcttcctccaaacttcaagccaagaacgctgataggaatcgccacggtcgaacggtactggcggaagtgagttgactgatgaaataaaccttgcggctggggaataacactgaaatagattttgcattcaatcgaaccaggactacgtgaactaccttctgctggaagatcaagctatttacatgaactttttcgactggatgttcaaaacatcgcgagagaaagcacttcaatcgtacgacgaatactggcgccgcctttgtcaatacttccaactattcgcccgtcgcagtgttaatgatgatgttcatacgcagatgcgacgcgtacggttgcttcttctgttctgaagaggattgggctaactagagtatagtttcttaatggcgtatttccggctgagcgcaaaatttccagacgaacaaaggacaagaatactctagatgtggatgtcttttgtgtgatctatcggcatcactgggtccattcgcggttttttcgtcacggaagtatgatcgtccaatttgctaccgtccaactctggtccgccattaccgggacccgacctggcgtcttgcttccacagaacacctctctacccggtgactcctccctgagcaagcgcaaacaatatcccacttttcagagtgatcttccgaaacatatccccatgacagaccttccagactcggtctgctatcgcgacattgagctcttttatctacgcgacccccagagcaaacgtgacgttctctgtgcggtcatagagtttcgtaacctgaaaggtcggccggaaggtgctgatgggtaagcgtggttatagtctcaaatgctggagcatcggattaactactgacagtcaccgccagaaccaaatttttcatgcatggcgattaccaactggcatattgtccgatcactcaaatcatttctttcgcttttcgagatggagcatttgttaatgccgaactcacaccggagctcatttggcggctccgagtcccaaaacgcagttcctccttgccgctccgttggaagccagaggttcttaacacgcccctccttcggcgttttaatcgcacgccatgtggctatgagcttcacccgtcgttgccaatgacttatgagtccagtcgacgggcacttcatgagttaggtcgagatgctcgattcgaaaacgatattggacattacaattttcgtcgttgggtcgcaaatgaagtcaatcgtaagtcactccagtgccaaatctccggaaactttaccaccattctacgatgttcgtattaagtctgactaggagcggacaggaaatttcactagccaggagcggcagagagtgctaggccagtcgggtgacgcggtctttgaaagacactaccagtcacagttcattgcacgtgatctccaacatgttgttctccttcggccgcctcaggagggtttattgcgcgtcgctggcagtatgctcaggaagagggacccgttagcgccgtccgagcttaccgacacacataaacgtgctatttgccgacatccggaaatgcttgagttgaaacgagaaaagagagagcttatggcggagatgcgatctctggctggcactgtgaagaatgccgaaaagccctttccacacctttatcaacgtcacaaagctgtcgacagagaaatgaccaagcttcgcaagactttggcaaccgatactcgagagaccgccagaaaggattatttccgtaacgcacctgtactcgaagtcgaccgacagatcaaacagcttcttggcgatcctgatactgaatcatgcgatgcggacagttctgacgatgaggactgggagttgcctaccccgacgtacgttttccttgaacgggctcgcctcgtggagaacttttatggacctgaagcggagaattatgacgaggaccagctgctcgcgcgtcgcatccaggtaaccaaggacatggtcgcgctcctgaggctttgcgagcccagcaggcgaggcaaccgtgttgactggaaattcgacgacgtggatgatgacatatcaggccagccagaggatccctcggctcctgaagaagacaatatgaaatgtccaacggatgtctgcatcatttgctatggtatatcccgtcgctcggcgtcaaaccctcctccacatatatttcctaccaaccgtccagactctcttcgtcgtcatctcatcgactctcatctgcgctatgctcacgacggaatcagctgcacctgggaggcctgtcgcaatcttccgacgtttaccaaaatcaccgaatttttggcccacgctaacaatgagcacatgtacgatatcaagattaaattgtgtcacctccccagaatgccacagttttaccctagcgacggttcctccagagacgcgtctacggagccggagactcggcagggcaccgaaactcccgcctcctctcttgattttgatatggcaaatattgaccctcgattgatggaaccgggtcctatcaccgccacgaagccatcatgctgccctcctagcaatgaagttctcgcctctgctggatgtccaatgacgagcaccggttcaaacttgacggagattcttagcgggcgagtgacgaggggagcagcaaaagcggcgaatcgagaacctgaccctaagctggggtcttcatcacagcatgggacgcgctcatctcgaaaacgcgggcgcccagaagagctgccttggggagaactggggggaaagaggctgtcgggcgaattgaaatcttccatgatcaaacctacactacgtcggtcaaagcgattacgagccctgtgattcgtgtactcggtctatttatgtttgtatattcgagtgcaatccaggacgtctcagtagatcgtacatcgcttcccagttatgcaatgaatttagccttcaactattatctctccattagcaggtcataaaataagtaatgacctatggtggtcaaacgaaaatgttttaaggaatgataggatagcaattgggctaaacataattctcagatcaattcccaaatctagaggtaccagtgtgtttagtcagcttactgaaaagtcagactaggtgaggctcgttacattaggttgttgattggcttccaggaagatgactaaagtgaccctcaatcgcaacagcgaaaacccaaagggtgtcacgagacttccgccccaatgatctcccccacggcaaacaaagtagagataggaaatctttggtcctttcttcgtcctcaacttatatgcaccgaaagcgtgctgattctagattttgaatagggtccctactttccaacgccagttcagaaccgaaaggaacctctggacggcccgaagactttgtaacttggtatcacttcaaacaatttgaattgatgcggggcttcataaactgagatcaagtacagatcttccttaaaagagttcagaccctccatctggctaatgatcggcttccagggggctgataaactttctcttgaaatgcaaagtaataaatgggcctgcaggagaaactgaggaacgggactaatggagaataaacgctcacaaggactcacataagagagtgaacaagtggaaactgacatgatggtcttcttccaagaacgagataaaactggaacaacgtatgaaagtctttaggtgcaatgatacatagtgaatcattagcgtatagatggtgcctattccattggcaacccgtaaaagctcgacgattgcgtccgcttgttctgaatctaacggatattccgagagagtccagtaaagcttgttgaaactcacattacgaagttggtccaatccatgtctagtagcgaagtcatacaaacgagcatgcaccagcagtgtcttaggatgtttgcacaggtggtttccatctccacaatacagcaaaaatatcgaattgtcgctgtgcacctggatatcttcatgactcgcaaaataattttctttcaagggaagtagatcctatattgcaatttcgatttcatcttcgcatgcagcatgactcgaactatcggctgctggaataaggacagagtagtccccactgtgaaggtactgaaggatatggccaaagatatcctcaacatcgtcgtcaaccacataaattatttcgggcgaacttttataacgacaccggaggctttggattatcccgctgggcgcagtgaatttcttcccgttgggaccaacctccaggtatgccaggggggagataaagtgactaagttgtttttagataacgcctccagaggaaaggaaagcgtacttactctggccgtacttgaatcataatgagatattccgtcggtgttatcaactgaactcgaggcagcaccatatacaggagaatcagaagcgcagcgaatttcttcccgttggggccaacctccaggtatgcgaggggggagataaattgactgggtgtttttagataacgcctccagaggaaaggaaagcgtacttactctggccgtacttgaatcataacgagatattccgtcggtgttatcaactaaactcgaggcagcactatatacaggagaatcagaagaagtgagcagcatgagtttaaataattgatcagtggctaacgagaaatgtgtcgtcgtctacgtgctccctcaatgtgactggtccaggacgctgactcagcatgctggagcaaggcccacgaatttgatcatcttctttcgtggtcttcttctggaacgcccagccccgcgacctgcgtcatttgctagcgggaaaaggggtatctagggtagaggttgagattgatcttggtgtgagaggctcgcccctagactgtcttaccttcagtatcaaactggagagttcaagaacccccttgggggcgtgtaccaagaaatcgaggctagatgagctttacgatggattcaactaacaagctggacatggcgcttcttgtgcagtattctgcatcactagatattcttgaataaaaaccgagtattatagcttccacataaagctcaccggcttgctcagtaataaattgtaataggttgcccttagacacgcattagctcgtgctctcttcataggatttggggtataagagccgttgactaattatactttcttttcttcttctatattctaatcccttccctggttgactacgacgacgtttctgagcgtgagtagattcaatttgactaagccagtatggtgtgtatcataatcttaaagttctgtgggctggccttttcaggtggggagccaaaataacgtagaacataatcgccaaaggcaacagatggagcgatgttgatatctttacagctgtgtattaggaacaagttcttctgcctaaatccaattattcacttccctgggcggctgggcctaacgtagtacctaggaagagagaacacgctccaattacagaagaagtttccataccacttcattttggtagacgtatgctaattagcaacattagtttctcgctcacagtccaccaacaagagaggtggccatctctaaaacaaattcaatgcgaaaagtctcagcgctatatctcaacaacgatagttgttgttaagggctttatacttctagatttttaccagcgtagttttcgatacgtcaacattatatactactaaaaatgcttatcgtgcttggccacgacgacatttgtaagcatgattagattcaacttggctaagtctgtatgctgtgtatcataatcttaaagaacatctgggcgggctgccattccagcaacagcgattcgagagcggttcacgtgggatcatgtggtgaccaacgagagcttgccctttacaacatgtgcccaatctcaacccactctgtattggatcacctaggtatgatagagaccccatcgcacgctgagaaagtcaggactagcctcacgttgacagctcatataccccgcagcgccgaccagaccattccactcaaaccgggcaatcgaagaattaatgaggtcaatgatatcttggttgccgatgtgaaccgaggcaccactgctctcggaggtgacaccaaacgcacaggtgccgtattgaaccagctgatgttggacgccgaaacctatcaccgtctaggtaccaccaccagcgatgtttgcagcgatttttttgtagtctaacacacggggagagccgcccgaggaccggttgataaaggtagagggcccgcagtcgttcacagagttcctcgcgacaagtgtcatagtaggtacaacgggctggggggcggcggaggcggcggcggcgatagccgcaaccatagcgcttacttagaacttcattttagaaaggacggaaggattggatggcaattgagatattactatacgtgctgcacggaaaagtaagaagagagaatgtgcttaatattgttggttgtcttagtacctaggaacctatgataacttatatatgtctatatcttatagagctcctttagtagctctgattatttactagctagacctaataggtacgtaggaaatgagcgagctagtatttatcgtcctatctggcttactatagaaatagaaataggtaatatttcgtaaattagatagtgtcggcgctggcgtgataaatatcgctaagaggcgcgaaggagtctcgtacgacgtagtctttattctccaccctattttaataataaccgaggtagtagctaattaaatgagctatagggttacaacgctctttctatatatcccggctagtatagtttttaaattaagaaaaatttacggaggataacccctaggagttacggtctagaggcggacttagcgtctaccttcccctatatccgatataataaaccaggagagatcctagtctatatattattcgcgaagggaagctgattatagaagtcaggcagagaaaacggatttgctaaacgatcttaaggactaataatcttagggatgatttcttataagtttctttgattcctacgtcacgattgcccaaccctagcctgagacatctgaatggacaatataccgcaaaacgttctagccaggccgtaattcatagtgtgactgttagccgcaggaacctagtccgaagaatgtaatgcctggaggaagctagaactaggacggctagaccgtaagcgcgataccttcggagtccgaagttctcccgttattgattaaattatgtgtccttagcaactcgtgttgtgcctcttccgccgagaaggatatggggggggggcacgaatatcggggggcttagtgtacaaaccaggctagaagaccatagcagtagatcctataattgagtaagatcgatcattaataatatccattctagataggacgtaggtgacaattagttatacaatcaatggtcgcttagtctcaggcaaggtatcggaaccagagtctccgcctatatcaaaattttattaagtggagtgactagaggtgaggccgacgaaaagaacctgtcaaacgatgcccagaatacccctacaccctggtaccgctaagtgccgctagagttgtcaaagcgctatctctaaccaaagagaattatttttgactacttcctgctgccgcaaaattggagcgagcaagcgatgtaacagcctggctagaacgttttgcggtatattgtccatttagatatctcaggctagggttgggcaatcgtgacgtaggaatcaaagaaacttataagaaatcatccctaagattattagtccttaagatcgtttagcaaatccgttttctctgcctgacttctataatcagcttcccttcgcgaataatatatagactaggatctctcctggtttattatatcggatataggggaaggtagacgctaagtccgcctctagaccgtaactcctaggggttatcctccgtaaatttttcttaatttaaaaactatactagccgggatatatagaaagagcgttgtaaccctatagctcatttgattagctactacctcggttattattaaaatagggtggagaacaaagactacatcgtacgagactccttcgcgcctcttggcgatatttatcacaccagcgccgacactatctaatttacgaaatattacctatttctatttctatagcaagctagataggacgataaatactagctcgcttatttcctacgtacctattaggtctagctagtaaataatcagagctactaaaggagctctataagatatagatatatataagttatcataggttcctaggtactgagacaaccaacaacatcaagcacattctctcttcttacttttccgtgcagcacgtatagcaatatctcaattgccatccaatccttccgtcctttctaaaatgaagttctaagcaagcgctatagttgcggctatcgccgccgccgcctccgccgccccccagcccgttacacctactatgacacttatcgcgaggaactctatgaacaactgcgggccctctacctttatcaaccagtcctcaggcggctctccccgtatatcagactgcaaaagaatcgctgcaaacatcgctggtagtagtacctagaaggtatcaggtttcggcgtccaacatcagctggttcaatacggcacctgtgcgtttggtgtcacctccggcagcagtggtgctcgaatcggcaaccaagacatcattgacctcattaattcctcgattgcccggtttgagtggaatggtctagtcggcgctaagggctctataagctgccaacaggaggctactgctaatcttatcgacatgcaatggggtctctatcataactaggtgatccaatacagagtgggttgagattgggcacatgttgtaaagggcaagctgtcgttggtcacacatgatcccacgtgaaccgctctcgaatcgctgttgctggaatggcagcccgcccagatgttctttaagattatgatacacagcatacagacttagccaagttgaatctaatcatgcttacaaatgtcgtcgtggccaagcacgataagcatttttagtagtatataatgttgacgtatcgaaaactacgctggtaaaaatctagaagtataaagcccttaacaacaactatcgttgttgagatatagcgctgagacttttcgcattgaatttgttttagagatggccacctctcttgttggtggactgtgagcgagaaactaatgttgctaattagcatacgtctaccaaaatgaagtggtatggaaacttcttctgtaattggagcgtgttctctcttcctaggtactacgttaggcccagccgcccagggaagtgaataattggatttaggcagaagaacttgttcctaatacacagctgtaaagatatcaacatcgctccatctgttgcctttggcgattatgttctacgttattttggctccccacctgaaaagtggcaataggcaaaatctcagttcagtctgagacaagcatcttgtgatacactaatctggcggccaaaattccctggttccataaacagctagctggggctttcttcggaaattattctccacccgcaggcaatttgtgtggtagatagtattcaatttactgcaggaaagccgagagtatacaagagagccaatatctttcgcgggcgagaccgaaacacatgcccccggctctttgtattgtgtctcacgttctcagtttcatctagtctgctgcttcgagatctaccctccaaataacaaacatttcggagcaatggtggtgactatgtacgctgttcgataaaatatccactgtaatcactaaaagcataggccatgacgggattgccatagccgacgccagctcaagaccgaggcctggtaatgctggggttagcctcggagagccgccatattgcgtctagcgcgagtaacgctggccccacacccgcataataggttgggggccgaaatatggactccaatggagtcataagttggagcaggttttcagcatgcttcccaaaatggccttatccttctaactccaatctctaagaaataaaaatgcttatactgatctcttaaaagtccgtattcgttgttgtacacgttgctggcagatagggcttcccttaacgaggactgcactgcatcgaacaaggtagcccgatccacttgccaaaggtgcgccttgtcttagatcgtataataaaaatccgaaacgaatattaatcaaagagaagagcacactagcataggctaccgcacgctatctttcttccatcaatactaccctaaaataaaattgatcctacccagcctcgaggacaccagtatcaataaactacttaacactaagcgacgcttaactacacaaatctaatatatcttttaaataatatatacatagttgatcatccagcttactatattattataacttccagctattccgtataatatagggtcggtaggcactaacatagccaccgacttctcggagaaacggacatagcacgaattatctcggatacaaaattgagcctatagggagaggacttcagagccacagagcgcctacagtctaaccatcctcgataggacctctcccacttgatgtcttactttttagaactaaacactagcggctacgggccatatccgccgggagtttaaaaattgggcctccttaccgcaaagggggatccgattgacctatggtttgcgttattaaccactaccccactaggctggaaatggattcggactttggtctagtggtcaaatgctggcttcaataactaatatgtgaggcaatgagctcctctattctagaaaatgtctttcgagaatttaaacggtctaggattcttaccaaagaaaactctgagttctcggccaaactgcgaagacccaaattgtcgatccttacctttacagatctagtttattttacactaatcattgaactgttgagcaatatataagtggttggcatacatacatttcactttcccgctgcttccctttcgggtaaaatgtccacagcatacccccaatccagactatcccacatatcttctcctactccccgtaagcctctcaaagcccctgttcgccagattgcttttcgcaaagaatacgtcaaagacaccaaaactcaacttgtcctcaaatcgcaaggtgatgctcaatcggcggttgcatacaaggttcttgacgaatatggctcgcttcagttcactgtgactgggcggaaacatagtgatcgcatttgtcgcgaaattcgggactcgtctgggttacctttgttcgaacttcaccgaagaacttcgctcacagctacctgggctgttacgttacccggtagcaacaatgcaagtttagctattggttccccgcgatggccatttgggtgtctctcagctggaaacttcactctgtctgctgagaatcaagctgcggttgacacaaaggatggcgatgagaaaaaggtcacgttgcttattgagaggcatggcaatgccttggcactatttgatatagtggatggcgataggaaagtggctgaagtgcgcgagagtatacaacacaacgagaagttacctttgacgcggagttcctggcaaaaatatcggcctgctcttgatcttattatcacttccagagttgatcaatcactggtgagtgcctcgaaattattggtggttggacgtcagattgactttgtaatagattgttaccgtgggagtcattttatcagactgggtctttggttcgacttgagtacagttctgtcaacggccggtgaatccgcaaggcctcatacatagcaatagattatcactagacaactatatctgtccgacagttctgcgtacattagaacaaaaagggctctagtagtaatttacggctgacgacttccaaagcgatgtaatcatatagcaatatgggcccttctccagggatacaaattaccagggttgtgtgagataataccctgcccagcttatcactctcggttgatccaccgaccaagaggatttcaaaatgaaacggtgactatgcataactacagtatggattaaggatggatagataaatgactccatttaccctcaaaacgttgatttgaccactagaccaaagtccgaatccatttccagtctagtggggtagtggttaataacgtaaaccataggtcaatcggatccccttttacggcgaggaggcccaatttttaaactcccggcggacatagcctacagccgcaggtgttcagttctaaaaagtaagagatcaagtgggaaaggtcctatcgaggatggttagactataggcgctctgtggctctgaagtcctctccctataggctcaattttatatccgagataattcgtgctgtgtccgtttctccgagaagtcggtggctgtgttagtgcctaccgaccctatattatacggaacagctagaagtcccaataatgtagtaagctagataatcaactatatatatatcattcaaaagacatatcagatttgtgtagttgagcgtcgctcagtattgagcagtttattgacactggtgtcctcgaggctgggcagggtcaattttgttttagtgtagtattgatagaagaaagatagcgtgcggtagcctatgctagtgtgctcttctctttgattaatattcgtttcggatttttattatacgatctaagacaaggcgcacctttggcaagtggatcgggctaccttgttcgatgcagtgcagtcctcgttaagggaagccctatctgccagcaacgtgtacaacaacgaatacggacttttaagagatcagtataagcatttttatttcttagagattggagttagaaggataaggccgttttgggaagcatgctgaaaatctgctccgatggagatttgaggcgcacggaaaccaagctctgactctaattgtggctcgtattttggcccccaacctactattcgggtgtggatctagcgcagctcgcactagactccacaatacgcccagcatcaccaggcctcggtcttgagttggcctgtcaatcctgggatggcctgtgctttcagtggttagaattggggtttgcaattgagcaaggtgcatagccaccgtcgctccgaaagttcgctatcttgagggtagatcccaaggaaagaaattgagagcttgaggcataatggaaaaagccaggaacgattgtttcggtctcgcctgaaaaagatctcggtcctcttgtatacctctccgctatcttgcagtcgattgaatactagttaccacataacttgcccgaaggtggagagcaatttccacattatccctatcgaggaaaccgccaactagctgttcgtggaatcacggaaatctggccgctggattagtgtatcacaagatacttgtctcagtctgaactgattttttgcctattgccacttttcgagtgaagagccaaaataacgtagaacataatcgcaaatgcaacagatgaagcgaagttgatatcttacagctgcgtatttcgtataacttcatatctaaatccaatccttcacattcctggccctaacgtaggagtacttattatttcgctggctaaatcctcggaggcttatgctccaattccgggagaggagacttcgatatcaatttattttagtggatatatgctactttcttagcggcattagtttgtcgcttacgctctaccaagaggagaagtcgtggatataaaaggcgttcaagatcctcccaaagctgatgaaaacgtccttcaaaattagagaccctttcctttgagacaagcatatcacttctccctcggcgaatccttcgtccttgttttagtgtacttttcttcatcatgaagcttccaattcccattgctttcgctaccctcttggcctttgcccaagctgctccatcgggccccggagaatctcgcttggaagcacgagcttctgtcaacgactgcggagactcgaccttcataaatcaaagcagtggtggttctccacttgtggctgactgccagcatcttgctaggaatattgctggcggcggcacctggagagtcactgccaccggcggccagcaccagctagctcagtatggcacctgcgcttttggtatccaaggccacaaagacatggatactgcacacgttggcaatcaggacattatcgacctcatcaactcttccatcgccaagttcaactggaacggaaaagtcggtgcgaagggcgatatgttatgtcagggcgagaaggggctcatgggtaagcccaagatgacgtggggtatctatcatacttgagctatagcagtgcgatcgatggcaggtttatttgtaagttgctctgggatctcatgtgtcctatatacggagaattgggcgctaatcacatcttgaaggcatttcatgatcgagacaagcatattattgtgtcacatgcattttcaggccatgccatgctcagttcagtgtacttaaatagtggaaatatcggagggactgtctgattcaatctatcttacgtatattcgaaactgcgccttaccgtagaaatgtggttattacagatcttagacacttgttgcatgttgactgaaatgcggcatagttttatcacgtgtatccaatcttgtcttatttggctgttcatgatattgagtgtggcacaaaaaacataccgctccggaaagctcgtttcggtaatacacccctaacataatcgcgccggctataacgccctttttaccacagtcgcaagaagttgctcgctaaagtcgcccagctcgaaaggttgagagaacaccacccaatcagcacctacttcgaggtgccattaccagccctcgtcgccctcaaaaaagccatgttcaagcttgaaaacatttggaccctatcccacaaagggtgaggtgaatgaaacgtttgaaatcgcgacagctccccgtatttagataaaagattgttagagtagtctatagatacttttccacttagactaaatatcatatctagctattttagggggtttggagaactttgctaatttgatgactgattagggcgatgtaattcccagtaccacaataacgcaagttttcgatttcttcgaaataggtatagtatactaaaaattcttatcgatacctctctgacaataatggattagatcaagttgtggtggttgacgtacaacgctatattctatcgcatttacgatgtgtttcgcagatgtcggtcgcctggagtgggtggcttggcttggctgtcttgcctgggcgtttcggttagagcggtgggccccacccatggtatgtcattagtgtccgccatggccttttcttttcctttcctccaacgcatcactaccaacacccttgaaaacgaacactggctgaaacatttttgaaagccacgtgattccgtcttgctaatgcacatcattgagagcctcatgctggggtgccggcatttgttgcggaccttccaaaggcgcagccttgttacgactgccctctgccttgcatttacaattttcctgcttgtacctcggtcaagagagcaaaacattgcagtgcgacgcaatccaacagtctatgcttcaaggtatattttctggctacccgagctaacatgtctccttgagagttctgaacgtcgcctgaagcggcggttcacgtccagtcgctaacatgctcatctccttgaagtaaaaagaatgccttttttttaggttcgggcgctgattcggatggggtgggtctcggtcagcttgttttggaaacttcccaggggtcacaatccataccttacaatccatatcctgaatataacagcgctgcatggaaaagaatgtggagaggaacttaccagcagtgtgttggtgcaaatggttcagcactggaccccaggaacgcagaaacagcgatgaaagggtttcgctggaatcaatcaggtgtgtaagtgagactagcctaaggtgaagtgttgtaactgatagcactctagattttccggcgccaatatttggatcttacgaggcgtggaaccttgatcggagtttctgcaccgaccggtactctcgatatgcggcgtacggttacacaggggaagttcaagatggcgattcttttgacacctctagcgaagtgaagtttgagtatgtgaattgggccactttgcaacaagactgcttgcagcgcaatgcagaccgataccacccttcaaatattccaaagacgttgactctacacaaggagtataataaaggaatagatgaatatgtgttgagaggagaggacgcagagacatcccaaagtaacgcctctgctatcttcaaaccacggacagcggtggttctacgcacatggctcgacatggagtatacggaaaacgatctccattatatccagtcgatgatcatggagctgtcgctcttatcgggcgcagaatatgaggtagtcctcctagttgatgcgaaaaatgctagattgcctcgtccaacggacaaggccggcatagacagtctcaaaagctcacttccgcgggagctccaggatctggcagtgttcttcaactcggagatactagaagactggtacccgaaaatcgatgttcacgtgtaagcttgctttctattcattttcgtttccctacacctgttgtcaatttcggaggagacgctaatctttatctagagccatccttcaatacttccagccaatgcagattttctctcggctgaatccacagtacgactttctctggcagtttgagatggattcccgttatacgggacatttctataactttctccagcaggcctcggaattcgcaaagcaacagcctcgcaagaatctatgggagcgtaactcttacttttacatccccgctgtccacgggacctgggacgatttcatcgatcaggtagaccaaagtatgacgggccttgatagtgtttggggaccgcggccagcaaaaggcatcaatgttggaaatgaagccccaaagccaccgcggtcaaacctagaggatgactcttggagctggggcgtgggcgaggaagctgacgtgatcacctggttgcctcaatttgaccctcggcacaccgattggccttttgccaatcgggtgtataatttccgccagaagggacgtactccgcgccgggcatccgttgtcgcaatgtcccgtgtctcggcacggttgctccggcttatgcatgcggacaagactgagaaggggcttggactagcatctgaaatgtcccctacttcctgggctctttattatggactgaaagcagttcaagttcctcagcccatctaccatgcgcacgagacgaatcccgatgaactcaatctccgagctaattcaggcaagccaggtcagatcagcgctgggccgaacagtatctggagctggaaccagcacaatgatatattgatgaaaatgtcctatatgtttggatcagaatttcccgagaagatttatcgagcctggctaggctacgacaatgcagaaaaagtgagtacctgcgctgacgccttgacctgccgcttttccgcgcgcttgggtccccaggttgatattcgctaacaatacgcggaaaggaggggcgtcgtcggctttgcttgcctccgatgttcttacacccggtgaagaacacaaaagaataaaccggctcaatcaagatttgggactcgtcgtcattcacgcgcaccaagcaatgcaaatttttctattacgcactcatggcatataaggataatcacgatattattccggaattccgcatgccactttgtctgttacccaattctacataaaattatcaaggaaagaacgaatactgtctgaaagttgttatgtacaaaatgaccaccgcgggctaagaaccagctcgctctttcgccgcatcatgctccgcgcgtaaagcctctgcatcattcatctcaaacccaaaattccaaagcctctccgcaactgtcaactgagacttagacttgacctttctgggtggtaaaatatcatcatcatcaccacctttggagctcttccgcccaacatgctgcacaatgcttggcgtcactgcccaacgaatctcatttctcgcgtttgcgtattcctccgtgagcatgtcgacgtatccgatgtgcttggacgtgtatagctccacaagctccggaatccgtgagcgaggaaagacaaaggcttgcgaacaacatccaaatttgggcatttgatatacgcccctcgatggagggagcatcgtcacccggcccgcggcaaagaaaagcccaatcagtaagggcgtgaatacaccgcttaaaatgacgactattgtattcggcaagaaggagcgggtgtaggggttgagttttcggaagatcaggagaacgcaagcgacgaaacagacgacaagaatggagtaaagaaggtagttaagccattcttcggcgttccaaccaagaaattcttcggtgtaaaaaagacgcagatatagccctagtaagtaataccatcagcaaagaagaaaaggcaaaacggttaggagttaggggtcagggagggagcgaattcgacggtttaggatttgaatttaagaacctccaagtccgtaatggttaaaactcacaatttgccgctcccgtttctcgagtctgttcttcggcagaggataaggctgctacagtgcggtgataccatccatctagagcgacgagatcatcttcaagcataatgacatacggcgtgtcaactgtcgcacatgccttcaacaagtatgtatagtcaaagagagccttctcgcgccctgctattttagcctcattggtttctagggagcgtatatgattgatatcaatttcggaggcattatatagcaacacctgatcagctagtttgtgtaaccacggctctgcaaacgcgggatgctgcgacggatctgtgtgcgcaataaataggatcaagtgtatgtctgctctttcttcctcgctcagaccttcaaggagtgtgcccacggtgtctttgaaatagcgggcgccctttctcgcaatggtggcaattcccaggcagaaatgaggctgccgtggagctctcgttatctgaggcgctgcagcattgcttgctgcatcgatgaaagaagctgcttgctccagcctgatagccgaatatacgggatcataagcattcattgcatcaaaaaatattgaggttgggtcgcggaaagactgtctgcgcgcgaccacaaagagcaaggcgtaagagagcagaaagaatagaaaggtccgaagccccttgaccgagctgattgctgagaggccaagagtggggactagccggttcacaagcatttttgaaaggcgaggataaaagtaaccaggattcacgttccagcgatgatggtagattaggttgtccgtaagaaggtttttagtgcgaaatattttcataagaaatcattctcgaggctagtaaacccaggcttcgcttagaaaattaaaaattcattgcctgtctcctacaatcagctttgattcgctaattccccatcgggtgaaatccacttattcatagacgagggaccggaagtcagcggacgctatttctgccactagagcttagtccgttggggtgttttctggtttctggtcacaaaccccgggcatattagataacgtattcaactacccagccacccccaacccaaacgattaaattcaaacaggtttatctctaccaaaacgccattaaatcaataaactagtcatcatctatccagacatgcatctctcctatggccctgatttttgcataacccgcatgttggtaatgctctcgttggcggcatgtaatcccttgttttctgtagtgggtaagtactggaagaccaggacagtgattttgaatgagcttgttctaaaccgcgaacttgaaaatatccttgaacaacttgtggttctccggaaggctgattggacacgggtatttggcggtttgaaactgcgacccctcgagccctgggagtctttccaccacagcatatgtttattgcttgcttctccgcccgcttcctccgcttccttgatcgttccagggcatctggtgacgtgcgctgccgcacgctgtattccctgaaacgaaggaacggagtgaaagacaaaccgtgcgtctgcacgaggctgacttgaaagctgagttgacgctacgaaaaacacagccaaatttcgcgccaagcttcatcactctcattagtccccacacgtgctcgcgtctctcttgtctcggggcaattgcgtgcgacagcgcgtccccagtttgcagcaggcttggcggtagggggagggcctagtattaggaaatgcgcgtgatttggggtggagagtgtcgtttgcccaataatattcaatgaacacccaacttctttcactatgtttaaaaagaaaatgaacggattaatatagtcggatttctgcaataaccaattgtttaatcaccgcttgcaaatcctctctgggctcatcctttcaccactattagtcttgtaccactttatgcctattcttgtttattctactgataggtgtctttgcaccatgttgttgcccatttaagcgcctcttctttctgttgcccgcattatttctcgcgttttaaatttgtattcctaatattgactacatatacccatttatattccactttttatctggcgagaatttctaggcttgtatcgaattcattgaagtatatttaagcgacagtaacttcacttctctcctaggggttcatgtttaaccagaagcagatttctgtgatctgccaataggagtattagacacttttttgtccttttgcatttgaaagatagaataacgaggttagcttacccttgatagttgtgcatcacgcatgatggccattagatgttattgctaggcggaatgagagccgaaggcttgcgccgtatagtccaaagttatacacgcgtccttcttgaaattgtcacttccaccgtccgcccagaaagatctatgtccctctagggggcggttagaacaatagttccattcccaaaaagtatccctctggcgatgagccccataggccagcacccgaaaagatcgtgtgtcggggatatttgtgtctctgcaagtgttgtcccatacgttgacttcctttgcgtcgcccgagcaattctcaccggtgaatgcgcggaccttgaatgaaagagctccggagctgagacagaggaacgggattgtctttccgatatgcatgattgtagacggaccaaatgtacgatgttgagctcggttttccaggttagaaacgataaacgatgcagagtagtccgttactctctgtaagatggattgtatggataggagacacaagtcgagtaaaccagccgcatttatagaaatctactgtcatgtgccaaggtcctgacctggacgcctaactgctgccaagtgataaaaaatggttagcttcattttccttggacgcctaacactgccaagtgatcaaaaaaagggatgagtggtacaagaccaatagtggtgaaaacattggggggaggttccatagatgtaggaagagtgttttctggcctatgttctccccaggccgacaaagacacaaatccactaccttaaggccagccacgtaatagatctgtggatctgcgtccaggcgggctttgagtctggagatgtggatccgtggttgggaagctgtggtgggaaggctttggcttaaggccctgtgagatagcacagttgattcgaggccacagattaaaggctgtggacgtggatccactttggacgtacgtccacggctcctaatctaggtgggctttataactgtcaactagcggccaccctggcttagtgaccataagggtcctcggtcttctaactacggtctatatgggtcacagatattttgatctagatctcaagtacattatttatcgcctactgccggcgttttgtcggccgatcatgatcactaccggcttcaattactcgtgcgatcgaattcaccgcctcttcactcacaaccagatcgtcgccgaatgtcataaatattgtgttcgtgccatcctcaatagccgcatcaaagcactgccccagtgggacttaccgtagattctggtcataaaacgttgcctaacgttctcgcgcgtttttagacgccattcgcccaacaggagaggggtcagaaggatcgaccaccatttggcggaccaagcgattccaatcgccgtgttcatcacgtgcgcggaacatgattgtcactgcagaatgcttggctacatcgctcgctccttctcctcgctcacgagactcatcttattccgtgggcatcttgtctaacctagctatttctgttcgtatgcgtgtatcggtctgcgcaggagactctggtaacgacgaggggcgctctaccagagtgtccttctgcgtagcatcggctataacctgaacctgcggcgaagcttccagcggtacagactccgacaactgttcttcctattccgaccggatattcctcattccatagtgttctaagttttgatcgatcgagctcgaaatttctggctgcggttcgaactcgaccgagtctgatctttcttccggtacctattgctagtcctgagtcaggccaacttggctaaccacgggccatgaactctgctctccattcatctccaacaaaggatgatactgtgcttcgaggaagtcaatttcagtaacaggtcttgctgtctattcctgatcagccgttcgtaacagtacgtttatatcctgctccagagtttcctgtggtagaatggataacttgcgggtttgttagagccgttgcgtgcggtcgtatggtttgaatttagcgctctctcacagcgccgcacttttagtgcccacagtcctagaggggcccgcttttatctccgatgccccacgtccttctaaaattgccagtactccttcaactccttccgatgaagaaagctgcgctgctgtttctaccgcttcattctcttgttcgcttacatacgcttccatattgacatccttcgaagattctcgcccagctacgttttcttcactccatccccgcggctgctcgtcctcggcatcagcaaaacggagtaacttgttttccttgcccgttagtgccatggaattgatatcttcaaatccaggggcgaggaggtgttattacctctcatgcgattccatatctgggtgtggtggtaaagaggtcacagatgtcaaacgaaactctcctggtaactgtaggggttgcatcaaggaaatttagccgtgcgagaccgttgattcttgtagttcttgtggttctgtggaggtatatcttgacccaacagaaagctgccccgagggagctctcgagggggcaaatccaaatccagcgtgactatgttctgattcttcatagtcactgaaaccatgatccctttcaataagctcgccgtgctccagttcatcggctacggctggttccatatcaggaagaccctgcttgttttcactgattatacccccacttccaacgaagccaagtcctgtttcggatgctggctccactatctctcctatccggctgccttccgaatcaatgcgcgcgatttccatgccatacccaggagataatgttaagttcctggaataaggtatagaatgccggtcggcacctgaggatcggtgccttcgctactgtcgttgctgttgcctctgtagcttcttcgcttgcttctactgacgtctctctcggcgtgcatctttcaagcgttgccgctctaagttactatcctgcccggctcctgtacccgcagacccaaaccgttctctttcaccttgcggcgaacgattgctcggaataaaaagcggtgacattagcaaatctggagttggagatctacccgctgtgtcgttattttcatggggtattgacagcttgctgaagaaggtaaagtagacactcctcctcaccaaagtagaagtagcttttcgttctctttagagggaatcaccatagagttagtcgataaaaaggaattgacaatcttgcaattaggcctcggcttacggatatccacatcgagtctctttcttagattcccttccaccaacgaattgtgccggaagcttatggtcaagaaggacggccctcaagaagcactcgctgactttatcgatcagagactcaatttcttccctattgtaccgataacgatctggtcgacgggctcttaaaagagcatcttacgcaatttgccgatctagcgactactagataagctactcaatttgtggcgaccaaaacccaagtctctttacgagtacagccatctcatacagtatcataggctccaccatctcccgattaggcttcgccgtaggatctttcttctgtggctttttagataactttgggtagtaacacatagaatagagccagagttatcggtatccaagttctgctaggtccacctaggagtgcaaataagaccgaaacccagcttctaatatttatatcaagaactgcgcataggtgggatcaaaagacataaaagccgcgcgcatagcggttctaatcgttaggaaagatctagaaggtgtgataagtcgtttgatacagttcacgcacaattctaggtaccagagatctttaaagaacgtatacagagatggaattataccctctatcctcttcaatcgcttccaaattaacgcccgctcggattctatgaagtttaaaaagacttcgccactgtatacaaggcctttcacggtagttctatctttcgaggagactccaggtgccaggagttgcaatgtttcgaccgtataagggtcaactttgaacatcttagcacaatcgtgtcccacgagtaaagaccagtattacagtagcctagttaacacataaactatctcctacaaacgtaatcagcatctattctttttagagtcagacaaccttacctcatcgcagcaaatagccagagcctacagaagagatccgatttatattccatatatcaccaaggagggcaagacaagtaacaagtcaaaagcagctcggacactcggataagactctagtccacaaagccgcctagctttattatctaacagccgcgccaaccatcgattctcgaagtatgcatttgcttcatttcgatattatcgaacttttaggtaaatctcaccatcgcttagaactctctcgttagaatattcatcgataaggcttatttaaagatcgggactaatgtcttagggctatcaaaactgcaggaaagcatatggtagatttctggcttaccatccaaatacaagtcgacagtccaccattagtcgatcgatagtaaatagtattctccagcctttaatcgatattagccataaaggcactgtatagaaccagtagagaaatagaggcgtaggtaccggctcagttaatcagtcatcatatcagcggcatttactcgtcctgcttaaagagcctcatagagatactaccgtgacacaacagcgctcacgtggttgtaaatatcgagtcttcgacagccttctttatcaaatatctcacagagtctttctacattttttatattcatatattacgagatagatggatatagggtaatctagctaatattaatcttggctgttccttagtaagtccgacacctttctatcagaacctacagttcagggtctatatacatagactcgtccattatattagtgaagcagagtctacatagcaggagagtatcggttttttatatttaactggtcttagcctcacagaagaaagggtccacctagctgattcagcgtcctagtgaccaatataactgcaaaagctaggggtggccccaagacaaatttagttcaatagatacaattgcattataaatagggccctcttcgccttcaggcgctacacttttccgcctcattttccttccgaccattttaatctggcccaaatatatcgaaacaagataagcactgcacggcacttaacttcaagagctaccaagaacggcttgcgaataacccatcacaagaagcacccttaagcaaacagtcacatcagcttgatacacccgcccaattagacagtagttccaactcgaaaaagagaaaaacgtcttcccggagcgaacatacacgaaaggttgtaagtggaggcccaaagcgccttatcttacctcaggtgtacgaggaaggtatatctcgcgggttaatcgtgagggaagaatcaccctaggacacttatcgtcggactctcaggtataatctagcaggcgaggtattcattacagctcgccgttcccgtccatcccaggtagtagccattcgaaagtacaccaaaggggacataactaaaatacgacagctatttggtatccttaaccacaataatatactgacagcccgagagtacttcgtcaataaaggatacatatatactctcgtcaacaacctccagctcactttagagcaacttatagggtatcggtctctttatcccacagaggcggaattagcttccatgatttagcaggtatatagctcttaacacttcaactatcttaagctcatgacagtgcagattttggatggtttatattacctcaatgaaactggattagaacatcagtctctgacataccggaatattcttctcggcctagatggtattatcaagattggtaagtggcagttgcctcctttataatgatttttctaactcctatagccagcttagagatgtgtgtggaatatctaccaggtcaagcacagaacgtatacatcaaaaaactcgcttccattaccatagagatcatacagaagtatatgaaagataatggaatggtgggcatggataacgtggatcgttagcctgtcgactcagacgccttcgggtttctttccgccctctcgacagcaaagtctattgattctttgaaagaggtacccaagtccccatgtcacgagtagatgaatataacactaacacttatcagcaaccgcttgtccgcaaaaagaatcaattggtaggagagttgatcctgcttgctcggtctattttagtctccgcaaggatgttctattcctacgagaggtagttcgaaacactctcagggaattgtgaattttggcgtgctcatggtttccaagggatccatcatatgctcgtacggtaaagacctgttggcagctccaaacttagcactgcataaaataagaacctagcggtgctatatttgttactgtaggtcctaaagcagcggctagatcctagttattcagaatatcagtgcaaaactaatggttaccagagttatgagtaaaggagatcttgggctcagaatctcatctaggaaattgagatgggaatgaggcgccatttctaaaaatgagacgtaactgccacataagggatccatgctgcaatggatttcatatgtgctgcgtgattgactcatgcagctacgtgatagactcatgaccggcccgccgggagaccacagcggaccagaatcctctaatagaccatgatttttaccacgaatttatgaatgaacttagggacagggacagggacagggacagggacagggacagacaaattggtgtcatccgcaaccatcaacccgcgcgcgtatggggaatacaaaggattggttggaggacatggtcgaataactttagtcagcaatcgctactcggaaaaggccccaccctctggggcatggttccctacggtctaagagccagagaaaggcgatggcatcgtgaagataatatatttgactcaacacctgctggaaccgaccatagccttagaatctctggcgaaagattaggtaggaagcggcaagtctagaaagggatttgaggttaggaaccacccatctttctagcttacatgggtttacttcatgctccacgagcgcttctaggaaaatgtttagttggtcccgggaaaagaccttatcacctccaagcatgaggcctactgccataggctcaaacgatcgataaaaactagtcagagctaggtaacaattaagaacataaacggccaacgtgtctaccattttattctaaaaagctgttcttctgcctctatttaaaagtcagcaaacagccattccgtagagtataaataagcatacatttgatttaccaagtcttcactagctagtaagatcaccccaagccccacacaagtagcaactttccaccaacgctcgccccagcggcattaatcgctcaaaaagtcgcgatctactttttacagaacgaattggctcccataaaaagcctataagatagaatctctagctatcgtggggattgcccaaccttttcggttaagcggatgaccgtttttctcactttccttcaaatcattagcatgattttcgaaataaatatagatccaaatctgcgcaaggcggcgattcacatcatctaatttcgaaactgaaccaatgaccgagttcaggtacctcagatataccacacatgccgccagagacgaattcaagtcaaacatatcaacactaggtaaggtatgcaggtgacagtcgactaaaagagactttaacgcagcaatctggccggatcgcataattataatcaaactatcaccacagtcttcgacatctcgggcttgtctttcgctcagtatctcgccagttgcaatctaacatattatcggaatacagtcaacgtactcagctgcctaggtccggttatcgacatacttataattgtgaaaggttcctttttcgatctcttgtacttccagaaacttaaaatctggtaaagtaagaactcttctgtggttataattctcaatgccgaaagcactagaatgattttcactgggctttgaatatttaggctatcctttttcgttactcacaaggggttggatttctgtgttttcacattctgcagaggcacatgcgcctaaagttgacgttcggagacatattatcattatctctttgttattatctatgggctgcgtcaactgtaaagttccatccgatagcagtgagacttctagctgttataaatgaagctgagggacatatttcagtaaatgctgacgctcagtacagtcctccgtattaataaagctgcattgtgaggtagccagatatttttcattctagagtgcctctgaagtgagccagacatcccaatcaacagggtcatcatcagagatatcgggtccaggggcgccgtgagagactaaagtgtctgggtcaaataataccatcattcatatgctagttaacgacagcaagaaatcaatggtcaacttctcgcaacaggcgatatctggatagcagaagaattgactcatgttcagtcaactaaagagtgaagaagaacgttcactgaattcgagagagctggatacataaaggaagaaagcgaatggcaagaaaaaaaaaaaagggcacacagggattttaagcgcctccaaaaggcgcaccttaaaaggtcacaactgcgtcccccnnnnnnnnnnnnnnnnnnnnnnnnnnnnnnnnnnnnnnnnnnnnnnnnnnnnnnnnnnnnnnnnnnnnnnnnnnnnnnnnnnnnnnnnnnnnnnnnnnnnnnnnnnnnnnnnnnnnnnnnnnnnnnnnnnnnnnnnnnnnnnnnnnnnnnnnnnnnnnnnnnnnnnnnnnnnnnnnnnnnnnnnnnnnnnnnnnnnnnnnnnnnnnnnnnnnnnnnnnnnnnnnnnnnnnnnnnnnnnnnnnnnnnnnnnnnnnnnnnnnnnnnnnnnnnnnnnnnnnnnnnnnnnnnnnnnnnnnnnnnnnnnnnnnnnnnnnnnnnnnnnnnnnnnnnnnnnnnnnnnnnnnnnnnnnnnnnnnnnnnnnnnnnnnnnnnnnnnnnnnnnnnnnnnnnnnnnnnnnnnnnnnnnnnnnnnnnnnnnnnnnnnnnnnnnnnnnnnnnnnnnnnnnnnnnnnnnnnnnnnnnnnnnnnnnnnnnnnnnnnnnnnnnnnnnnnnnnnnnnnnnnnnnnnnnnnnnnnnnnnnnnnnnnnnnnnnnnnnnnnnnnnnnnnnnnnnnnnnnnnnnnnnnnnnnnnnnnnnnnnnnnnccccctttaggtgccgcacccaaacggcagttaatcagttgaccacggttttcctcatggccacagttttcccaaccagccaagaagacacaccgttgaagcatattttgccagtcgccatgccctatgaaaatcctcgtcaacgtaatatcatggtcatggtcaaaacggaatacacgctctctaagaaaccgtgacgtgaaccagggttgaaacagacgccggtcaggaaatggtgtacactttgtttagaaatcgggaggtataccataactggagtaaacaggagctgatcacagaaacatagagtatatgctgttccttggaccaggaaacatattgatgaattgaacgggtttactgtgacggtgaagtgcaatagttgaacagtagaaagggctgtgtgttttctagagggcggtgaatcaacctatggtcaatcggttcattcgctggacccacccgctcatctccccatttctcagattagtcccttctcgttacagctgaaactccgtctcatataaccttactctctattcgaggtatttacgaactaattctctcaaacgatctcgtacgtcatacaacgcggatactaggaagttagcgcctggtttgttattcaaagtaatggacttacccataaccagaacctcaccgcggtcttcataagtatttggcagccgttttatatttcgcccggaagcctcttctaatataatttcatcatatcgaggctttccattgaaaactatcgcgcggcgatgctggccgaacggcttgccatattctatcatttagtttgataccacgaaaaaggacatttcgagtatctatatcatattatcagcgcgagtatggttaaacaagaagagccaacccacatagccatcatccaagatatcatcacttaacaagctgttcagaagtagttaggctacaacagcaatatctgagaaattcagcatcgttagtttactctttaaacatagaggccgaacttacccaatgtttacacctcccatacgaaatgtacccggcgcacatgtgacatgcaagtgttatacccatagaggagctttttaagataagagatcacacctactataccaaaatcggtcgcgactgccaagacgcattcgtaatagtctacagatttgctaactccatacagcccgctaacaaatgctgtcaaggaagtatagccatccagggctatacgatagtgaatagtctcagtaagcccttttcgagcttaaacaaaaagctccaggacatcctacttttctagcaaccaagatatcaccataaacgggtatatctgggcccaggaaaataggcttatcgccggtatccagagacttatatattagcctgcctcaacatataggggccttataagtgcaatccttactttcagtggtattacctctttgctctgtattagtatttgttacacccgatcacatctaatagaggcacaagaatagggacatagggggaagacaccgttcctaataataaaaaggaaaagttcgaccagcaatacaagtagcattatgccaagcggaatgtaaacatacagccggggcagcagagtaccggatggcagataccgccatacagaatatatgcaagctatagccagggcttagtgcagtcgaaggaatggctcataaaggaaacggcgaacgaaagggaaggataacaatagaattgcagccataatcacagagccctaagaagaattagcgctactaatctaacagggtaggttaagcgagagcgatgacaaacaattaatacaaagaggttaggcttctcgcgaagtatccagctcttccgatcagttatcattgccatgatgatatgtaaaccaagaagaatgccagtcatccaacccacagcccgatgaatgcgcttacacgtcatcaaagaaatacccatagcgtttgcaaggaatcccagatggtgtgccaagaacaggaaactcatgtttatcactgaaagggttccggcgcggtctctagccattgttattaacggagtcttgaagacaacaaggaacacatttgttacagcgtacgcgagatatgacaaggcatctgctcgagtgcaaggagcaatcagcctatggcgaccccacaagtacggatatgttaagtgtttcgtaatgaggaatgacaaaactctgagtagattcagaaaggaaggggctatacgaatgagaaagagcgttgtcagtaagcaccccactgcaatggcgtaaaagatcgtgatttccattgccagtcaggacttaggtatcacatatttttcaaatattgcaaggaaaccacggtgctttatacgcccaggatagtaaacttcaccagtaggatgactaatctttataccagaaacaacaactcgttcagcgttaccacaggcacccatatcgctgcttggaaccgttgttactctaaggtgtagttatatctctcgtgatatagtttgttgcagggcggctcatctttgtttccctgccccaatttagcggctcttcccggtcaagcatcgagcttcttcctgctttattcatgaaactcgcaatgacattgtggactactgtggtatttggcttggcacaccctctgatatacttcttgacatagcaactacgagagtgaaaggaaaagcaacaaccgtttttcacaaaaggtctataggcaaaaacatactgcaagacgggttgtaatacacttagtatacggcactgcgttataaagtgcctatcgttgctccctggaaactgtctcctccctggttttctccaaatcacgatctgtcatcacagttggagtcgggtaataagagctctggcaagtcagcgctccgcctggtagatgatgccatgtagtttacataccaattgcgaaataagaaaagcccaaaagcccgaagaatccgccgacaaaatatgcacctgaccagtctcccgttgctccctggaaactgtctcctccctggttttctccaaatcacgatctgtcatcacagttggagtcgggtaataagagctctggcaagtcagcgctccgcctggtagatgatgccatgtagtttacataccaattgcgaaataagaaaagcccaaaagcccgaagaatccgccgacaaaatatgcacctgaccggtttcccgcatgcgaatacctacgcatacatctgcatcacacatcttgctatattcagatgcctttttcagcatatttgccttgcgacgatactgtttttggtgcatcaattttctcgtcgatgaattcttggatcgcgtagttttcaaagcagccatttaagctgatgtctttctcttttgaggaagcgacggtctataacaaatgagaggctgaaggtggcgcttgtaaaggctgattgacaagagaaactcaataaaaacaggtgctatgtactttaaaatacaagtacgaaaagttgattttttgaacctttgaacctttgatatgtgaacaaagaagccacgattttctttgcgtgaagggaccgtggtcttgtgttgattaacgttatgaacgaccactgaaacagcaagttaaccgccatcgtaaaactgccgtcaccatataggggttgcagccctctttcacaggcaggtatggcccaaaaaggtgctgcaacgattagactgttcccccgaatagtgaaggccgcgggacatcgaaaagtgcgggtaacatatggcttggattggttattttggggagtggatcgccgtccccaaatagtagaggcagtgaacaccaaatagtgtcggggagtctacgtgtatacagtaacgaaattagccattttttcgtgttgtacaataattagggccaacacggcggaatgctgtggctggcccacctgggtagattgcgttactcaactgtgctctaaaaatgtttatgttcaccatcgatagaccaaacgtgaccaattaacggtgggcatatcacaacaatttttgttgatgtgttactacgaacagtgcggttctcttctgttaagggttcaacactgacggatatttcggttcaaactaattaacagaactctaaacatacagtgtcaaacagacattcatatagttgattattgcgggacgattttgataaaccccacaagtcttttactcatctggtcaatttccattaccatagatattaatttggttgaagagcactgatctaaagacataaaaagctgtcaagtatggattcaacgagatggtcaacacatggagaaagatggcgggcggtgacgttgcaatcaaatattccacaacccaggtttaaacagaggctgtgaaagcggaagctgctgttgaaaaaataggtgcaccttttacttaaggtagtgtaaataatatgattggccagaaagtagcaaatcctccacccggtcatcagatcatgtgcagcccccgataccctggtacaccccaggtctacagcaagaaaaaatttcgaccctggcagtctatattggattagatcggattgggccagttcggaacgggtcggcccggttaagttaaaggtctgggagccatcatgcatgctgttaagatttcgaaatcttgcatttttggaaccttctacggtaggacgctagctgtccccagatcactctccaaaatctacttatgtgtcactgtgcagcgaaaggccggatgtgtgaacattcgtcctcaatatacacaagtatttcccagaacacgtgccgtcgaacatgtgtgtatattaggattttgaaggagagaaccaaccttggacatgcccctggcaaaacatcttcggaactcttcaaatgacacgggcaaagctggtatgacaaatgtgctgtactggtatcaccaatttaggtctagtggcactctgaactacgctaagggagaggctagccggatcgcgcaggtctgactagaggagtcgtcgcccattccccctccactcgtatatacaactggtgttggtaggtagtaatgctactagaaaccaagtaaatttgtattcttttaactacgtctagcgatatctattaggcacaaatcctagggtatcgacaatctggagatacctaaggtacaagatggtacaagatggctcccgtcataatgtaggtgaatacggcatataaacctaatattaaatctagcgaggcgttaacatagtgtataccactcatcaggcaagaattaccttagcacgatctttaagagacgctcttacttgttcgtaaataggggaatgcagaaggaggtagaaatattccgataagtaccctaatataggttagtaggtcttggcgccaggggtggcgaaacaataaaagaggtaatgacaccaactttccggaagtactgtatagggccgaatagttagttctattttgtgactgtcgaccttcgactactacaccgcctatattcccacatattaccaatacaaggtgtttctaaacgagtcatcgaccttatttcgtatatatatctccggtaacagctagaatcttctatacaaacagaagaaatccccacaattatccaaatatcccagtctctttaccgaatggctagttttgttcaccgaacaaatgtatatatagcgaggcccgcacaagctaacgtacgttcgtccttcgccgtacactttcgctatactacgccttaccctctttccagccactagtagccttagatatacaatatgacagtaagaaagtccatagccatctgaactagggctttatcaatgaatacattgcaggttaccctctctcttgacctagcaagcatacgacctattcgccttgcaccccctccggatacaccaccgaggtgtactagatgcgattgcctgggcagcgaaaaaatcacacgtaccacaaatcgccaaggaaacgctggtcggcattattataaataccttccttgcgacaagtttctttgctttattgatgaccgaggcaatgatccaaccaacccatcctgccattgcgaagtatccagcaagacatacttggcaggctctgaaaaacgcgttccacggggcttgttttttgcttgcaggctaggagcgtgcgacttccaccaacccttcagaaatagtcgagggcagcatattactgtctcttcctatgacttagccgaccatttgatcaaccttcgtcttatttagtggtttcggcaataaggtaggaatatgctactgtctttttttcaattgtagcttgtaggctattaatgctaagacgtttttatagcacattcgataaactaccactcgatcttttcaccctagaagaggcgagcttcatctatcgaactcctttagttctgtaagagcaaatccagcattagaatcccggcctatcttaaacggaaaaaggtggtactaatattttaaagtgatatattatatcatgaaattattggatataaatatttttaaagatacgtatatatgctagatcaatatcagaaatggatactatcatcggaactaaaacttccctaaatattatcaatcttctccttagacttctgaagtttgctcttcaagctaccaagtcgggatttcgctgacatatattgatctatttaatacgcagatagaaggatattaaaaaaaggatcagaaacttcgatatttcgtatatcctcgctttgcgcaagctggcgactagtgcaagagatattgttccttttgaggggcagcgcgaacaatttcctcgaatgattggattgcctgaagagcaacaaccgagactctccacataagatacacttgtccttcgctctgtccatcgatgagctcccactgaagacgaacattggagtcacccccaggagctgatacccttatgaagtttagtaccccagtcactatggagtaatccagccagagattttcttcaggaccaggtataccgtagacaacgctacattctaaagagtaccgaatcactccagcaaataccccgagggtatctccttcctaaactgaaatgatgggacaaactttgagaaatacatcatctttgggttgaagggtaacaaaaatagacttgtttcgcgttgtttctgcctttggctgcaggtcaaagaacccaccaagcggtatagctgacggctcgtgtgatccgctcaattggaagatagtctcctctacgctggagaaccataggttgatagcgctgttccacgcaatttcaggaacacttagtctatctgctacaagcggctggctcagccatagtcttcctatgaaatcacccttactctcctcggccacacgctcttccagctgtttaatatggaagccatacttttcttcctagtcccggaccatctctaccaaagaagccccagcttctgatgagtagcttttgcagaagcggtcgaattcctttgtgcgatacaagaggattttgtcaacacccgcgttccgcatctcgaatagtcgtttccagaaaagacggtactggcgttgattagcgaggctaagtccataacccgcttccttcataaagcgctcggtggcgaccttctcggccatcgtgaattcatcaagagggcctttggagattagcaaatcctttaggtcaagaagctcggcgcctttcttaacgatttcccaatacacggtctcgttgaatcgagactggatacttttgcttgctgagaatgcattctcctacttgattagctagactgcatctgggtattgcaacttgacaatatcatccacaaaactctggatctctttaaccttcgttgtcatatttgcctgctttgaccggtgcccgtatcttccaagtggatcgttaagcttaatacagttgacaagtatgttctcgacgatactgtgcggcgctttctcgcctcgataggtgtacatgtcagtcgacatcccagcctgaggtatgctcatcgctgcgttcgcttcagccgtcgatggaggttcggctggtatgtccccttcccgaactgctacggcgtcatccgcctcttgcgccatatctttggtagtagccttgttcgctttggctttgtttctcttcttcttgtgagacggcacatctagccccttgtagtccgctctacttcgtttttcaggtgttgggaggaaccggtaagaaccacgcgttgcctcaggattcggactagctctgggagtaagaagaggtggtagatctgttattcctacccgcagtctcatttcgcggactttgaatgtcagtggaaatagtctcccagacatcaatccaggggctcaccaaagtcagaaatgcctaggatgtgttgcttaataggctcatcgttgcaatcgccgattccgcagattataagcaactcctgaactttgcctgccgttaaagactgaagattttcctccatggcggtgttatgctccagtccttaccaagagaagtcgaggggagaagtcgcgctgccggtattttcggttgcgcgggtaacactaatccgtaataggaaatataaggtctagaccgtggctaccagaatgagatggaaaagaagggaaagcaggaatttgcgggccaattaatacatcaagcctctctcctatattgaatgcttacgaataccacacgagagcttcattatatctctcgtcagccttagtctccaattatcacagtcgggtgcctatatattgctgtatggtgtttgaagtgacgcgggcaaagctagtatgacgtaaatatatcaccgattacggtctagtgggactcttaactacagaaagagaggggctagccggatcgcgcaaattcgaggtggggcgttaaggaaagtcaccaatttccacgtcatatacatgcagtattgctgctttaaatcgagtgcattttgtactcttgcaactgcatctggtgatattcatgaggcacaaatcttatatctacaaccatgcagagtactgctacagtacaatcctggggtagttagcggcaatctggcgatgcttgaggtatacgatacctcctgtgataaataggcatccaagtaatagggcatataaacctagcagaattggtgtataccaccaatcagacaaggattgccttaagaatatgtgacaagttcttcgagaaacgctcttgcttgcttgcttgcttgcttgtgtataggggaattcgatgctagtctgcgcccttcagaatttctatcatagctgagatcagccacctatggcttccccatcatagagttttgcttgaccatagcctcgagtacttccttgccctcggtcgcctcatcctgttccaaagggtctagcccatagcaagccatgaacttgagccagccaccaaattcgttgatgatttttcgttcggcaggagtgacgggtggctctgttcgcagttagactttcattattctagtagataggtttcgagagcatgaggatagccgtacgaaggggatcggggttcggcattttgtagcgtggatgtgaataggcgagggacagtttggaaagtgtcacgacgatgtacccaaattggctttctactccagagccctaaaagatggaggatatggtatgaccggtagactgattgccagttgttttgaatgaatgatgacctcacccaagcataacaccaaccccgctccaaatgatgctgactaagatgcgccaatggtgcagctaaaaatagtctagctgggcccttgcctgtggtctggaagatcgatattcaacctatgatgtgcgctagatgcaaatcttactatcttaattagacttacccgtccactcagcaacagtgaacctgtataaatgtccaaatgccgcgtgagaggtcaaaccgtccccatgaagcgaactcactatcggcttccaagaaaatccctccagcctcttgtacatgactgtattgtataatttcgcgtcgtaagatgccgtatcctaccaaggcatttgatgcggccgtcgaataaacgacctgcgctgaggcattggcagtggggccagaaatcggggttatcaagtgttaatctgtcagggcgatttcgagaatgactgtagaaagagctagaaaacagatattggtggtgtagcagtcgaagagccaacaatcacaaaatggactacagaacttgatatattgccgcatagctggtgaaaagcggatatcctgcgatccaacaataagaactgggatcgaaatcagttgtgcccaagcacatagcccaaaaactttattctcgtctaaacgctccggaacaaccacagaatgggcaataatgcatccccccagacttgcaccaggaccaattattagaacattgagaacagtaatatttgtggtgatctttggtcgaccctctctctccagacagagatgtgacgagatcggcggcaaagccgacagtttcctcgaggacagaacaaaacctttcactcttcatcagttcaacgatatggtcccgtgagatttgcaccagtagctctcggagatttcgatcatctttctgagtacattgatatgcctcagcaatggcaacggggaaatcatccatctgccaacaggttcttgcgatttgtccaaacttctctttggccctttgcttgagctggggtacaaaatatttgtccgcgacctgatataacctgacattgaagatcataggagaaacgcggccaagctcgttaccgctgctatcatagtcaatgccgtacataaagtggatcattgcctcgatagcgcgaggatcatcgtcattcaactggatagtattgtcggccgtctcctatcatctaggttagaattcagaatgaaacctcgcctgtggggtcgtactgcccagttgcccttgtacaatcgcgcaaaatattcagactgcccacagacgattaatctatgcaacttgaattcttgctcttcggttttgataacaaggtccgaaaactgagaagatatgaagaaactgcgacctttagctcgaaataactaaatctctgggttaaattgccaacctctgtatgctagcagttatatcccccacgacttgaccagggtccgttccatggccaacaggaattttctgaatctgtccagtcatctcttcgggcatctcgatctccgcgtgaggaaccgtgtgtatgctttccacacataagctgttttcacggagagccttcttattgtttctcttcatgagataactgtaaagtatgaaccacgcaatgcgcttaggatttgcaggaagggaggagggagggctgaggagcttttcataggaaatcaggtccttattcctaagtgattacacagaccgccttcatgcatatgaatgtaagggtgtgtgatgaacggagccaccgaaaaggaccgaccagtcttggaatctacgtgtaaccactcaatgtcctccttgaatatatgggcataccgccccagtccaacctgttaggtgttcagatcacactcctaagcccgccagcggcccagggccccaggcgcatccccagtaagggctttggattggtgtcaatatcgataagtggtgatttcctccgtcgtctgactctccaggtatacgcctcagttaccatggagatcatgcagtttggggggttagtgaaaggcaatactggcactgaccaaatctgccagcttacaccccccagaatacaatgatataggaaaagtttagacacccttctgctaccgccttcctggagactccttaccgccctgtatccgcggtcttttattagtgggggactggctggcagaattagggggtttcaaacttttgcagtcactgtatcaaggcatccttgctctacattcagccacagcaagtgtctgcagggcgtcttgtcacacatgcactaccgaataggagaccactgcggtagttgtatttcgaaattgacccacttcagcagcaggcaacgtaaacaatgggtgggaaaacggaggtgatattgtatcaattaaaatttaagtttttagatgtctaaatatgaggctgttgaaagcggtgagaaggtcgtttagatgctgtcctctccggagaaatcgggttgatcgaatcaccttctccacctagctgtggtactgtgaacagcattatcaacgtgattgtctgcttgcttccctcgacaattttcccactatgcggataggtcctgggagcgttatcaaacttggtttgatagatgaatgcaacctccggcttcatatcggttatagaatttgtggaatctggtcatggtaaagaaccacgaagacatagtatgagctggagaactgggatgtcaaaatgtggttagcgtatctcttactcttgctgagagtgccactagatcaaaacaggcagcatagttgggttgtccttctctgtcaccgctatttcctgctattattctgccgcaccaaaaattccattcaattattcaattattgtaactaatattcagagtaccatccattagactcagtaatagcctgcatccaacgtggcacgctctctgatagaccttctcggatatctaagtcaagttgctgcccggcccatctctaaaacatgttggggatcgagccagagcaatgacgtcatttaaccgtattggtggtgatcaatgggctcagaggagattcaggactcaaaatagcctatctgccctcaagaatgcaagggcttagcatatcaccgctaacgcaggccaactcgaacactactaattcggaacataaccggttcggcgaagttgagtgttgaagtcggcttgtcaaaagatgaggctatatcatatcaccatatacatattctacacccaagtatatctagctcattaatcaggatgaactcgttttgttacaggtaaaagacgcaaaaagcgaaagataatttgacttaattcaatttagtaaaaccctcataaatttagttgagaccgatatattatctgcggctcgaattaaggggtgcgggcgtgttgtagaaaataggtctgttcaaatttcaaaaatccggatgaaagcaggacttcggtcagatgcatttccgtttcaagtgcaacgaaaatagaccgacctgaccgcaattaattcgtatggttcacgatcaacaggggtggtcaactaatggtcaacgtgaggaaaagcaatggcgggtggtgaaattgtgactgaacgtccaataaaccaggctttttcaagagggcatgcaaaagtggtgtacattactgtacagcgtgaaaagattggctaactgagagctcctttcccacctaaagcgctggtccgtgcatttcctaataccctcgtacccccgggtcgctgacaagaaattatttcaacctgctcgcctccgcttcatttcgagccctcgggtgagaccggagaacttgaactcactcttctctcgtgtggttcgagtatgtatactagctccaatctctctatccttgtttcccaaggccccataccaagcgcgctagattgcattagggtatctttccgctggcctcggatttgtccttctacgaaagtcgccatgaattacagttatgtgatttctgtacataaccagtgtcaccactctccaagtatttctcagatcctaaatacttaagcactctaagccactgaggcccagagggtaaagcacgatgacttgtggttccaaagggtactcaagagttcgctgtaaattccgaagacattcacgtctcctagtaggcctgaggataagggaaagtagatagcctatgtagtcagcttatcgcgtgcgtaattcaaacgtggtggagacaaagtggcttctagaggtatggaaaggccagtacatgaattaatgggaagcttgcgtaaagtgatgagggtgggaaaagtgttggaacgaggcctggaaaatatggcagaaataggcttggcacggggcttgatcaggacatctctaacctgggtgaaatgaattttttactgtagacttggggggtgcctaggtattaggaaaaatgcgctgatttggagtggagacagttgtctagccaatgatattcaataaacaccctacttctttcagttatttaaaatgaaaatgaattatttaattttcttttcaatcctcacatttctgacaaaacgatcgtttaatcaacagctgcaagtttgcttgccgttgggcctcgtttctcaccactatggccttgtactactcgtcgatgtcttactgactatgtgtttattcacgtttattctactgtactgattgtagtggaaagcgtcattaatattgattgtacttccggtcaactcccaaataatcgttggttgcaagttatttattgttcatcaacatcatgtctcttcaaccggtggctttgcaattagcccgcgttttaatttgcactctaaatattgattgcctataccagagctcactttgtatctcgcgagtgggaccctcacttttcaccattgtgactctgcaagcaatttagctatcccccactcaatttggttagcgtctttatctccggtagttcagagtgacgctagccccaaactggtaattttttaagttgtggaccgagaataggcaaggaaagaactaagaacacagagtatatagtatttgcagttgcgaggcttggtcctgcttcattctactatcatcataaaaaaaacatcgttgaaagtacaaatttggctagctgtctttctgtttcctagtgttccatagcctttctgtgttcctaaatctgttgctctttccatctgaatctagaatatcgaacatgggagtttatattgccgaatttgggttagcgtcactatgaaccacaagaatagagacgctaagacaatttagcgtaaaattagaaaagacggcaatagaaaagcgaagggtaaccaggcaaagataacgcctaaagaaacttttcatggatgttattgagcaatggaatatataatgataaaataaaatgcaattgttatttgagggtcgatcaaatctgcgttttcaatggagaataaacgagaagagacacacagtgagtgccaaggctgatacgtgaaacattggtcgatgggcaagaaaaaatctacaaccagtgattgattcaacttggtctgttgaggtgaaggtgaagaaacccattttctttgtttcatagagtcatactttgattacttgtttcagatcacgtttcgcgggtatccggtatctatcaggccccagggcctatagctgaagcggatcgccccgtcctaagttgattatataaagcctacttccaatctaggcttagtggtactctggacactgctaagagtgcttagtaacagcgtgcaaggttgactcgagtgatgttatcaaaaatggataccgcgggttttcaaccaaatgggtcttaactgtagtttttagacattcaaatgccattaggtatccctaatgactcaagtgttacacacttttgctgtgtctatgaatgctttgtatatgggatgaccgagaattcctacgggggtcggtggaatgattaaacaatggcaaataacgtgaaaggcagtggcagaacggcgtgcggaataggctacagtcaaacctggataggcgcggagatgacaagaacctcgtccagatcgccgagtttcagagcctccaaaagccaaccacaccgcttcaaccccccccaccctgggagcaggaagttaatctagctaaattaagcctagcgcaattagagtgggacgttgggaaagaaagcgtgtgggtctggtggagaatctgcttccgaaatccttacggaacattatataaggcagcccccaccacccgtcttcagcccgcaattgagctctaacattctgccccgcgttaccactcccccagtttgcgacaaatcgcagtggtgtaaagtcgaagagaagtttttcattcgtcactctctcaggatgtccacaccaaccagaataattcgtgttgaaaacaaccctcagaaaataagggaaagtggcctactccagcagtatggttatgagattgtgaccaaggaaggggaaacatacctttctcctaatcaaactgatggagggagagacaaccaaactgagctactcactcaaatggttgacttgggatacaatctctcgataagtgggataagtggagagcgtgtcgactgtcgatatgtggtaagagcccttttccaaggttgaattcacaggtttaacaccgatgcattttcagggcaacagaacggttagctaactaatccttctgtgacgacttctattgaattatatgatataataacctgggcgtcaatgttagttgaatctgcatttggttgaagcggacagtcaagagttgattatataaaacatacttccaatctgagtttagtggtctcttctcgggctgtgccatgtgctaacaaacttaatcgccgtgtatgggcaagatagatgagtggcaaatgcaaacacacttcatttttcggaaaaacacctcagccgggatccgggattagctgacataagccgactggacgcaccacctagttaactatccagggcttgccaccgacatcctaaactaatgtgtcgacttggacaaatccacgtgtattatcgtcagtttccagcgtctggggactgagtggaataccgggatactcgaatgcgcatactaacgcattcatgatgaaaggattgattgaatagaaagacatgcgatcgggggcatgttgaataccctaggtcaatgctaatctttgctagcggtaagttaccgctctaatgctctgacaaaaatcaaaatccgaaaatttagtgccaggatttctccgtgtggctatcatttgagggctcctaaggaactcattcattttgccaagttacccttgcattgtcgccacgtcctagcgcactatatctattgaaggtggcaaattctgaccttgggattttctgaacaactcaaaggcaagtaaaaccatgtcccttttggcccgaagcatagtgaatggacgccgtggagtggcttgctcgtatagagcagcgctgcgaacttcatcctcagtgaaccagcaatgatcaaggtgctcatgactgatcttgacggaactttggccgaccggctgttgcatctcgctggaccagattcgttgcgccatcgtctcttcgttgtcgatggtggtgaacccgagcgtgcgcatgaggactatatcgccggtttttctatcttcgtgatagaaagaacacgtgaaagcattgccagcaattctcgaaggccaaatttgcgtctcctccccgctttctcgggctgcggaatggatgatggtcgggtcctcctcgtctggggttcctcctcttgtctcccaggtattaccccatgagctttccttgccgtttcgcaagatcaacagaacccttagcttggatgggctatcggggtggtaggaaaatgtgacagccatagctgtgaagcgttgaatgggatatagttctttcagacgatcgagaggaatattgagaatggccgcattgacccgcttgggaaggcccaaggtggaccggcgttgtttagtgtagtcgacatagctgagtatggggaaaaaaatcctggaccttgcgagggtgccatgacacttatatattgccatcatgtctcttccagcccgcaatttgatcgaaatatggtattacgtgagaatacaagaatctacaactatgttgcctagcctcctgccaacgaggatacgcatgcttcgatttccgcgaccgaattgtttagtacgagacccgagagcctatcatgcagaaatgtatctttacctcattgatatcgcagggtgaagggattacaatggtaggatgtactgcgtcgtgcaattctagtataaggatatagattcgggctgagtgcttctgataccaaaacgactaccacaccaccgaagtaagttacgcgcagccaaataacgcgcagaaaatggaaagctgctttagttcgtgagggatcccccgaaatggggttgactcatccaccagacccgatggagccgcttacgaaccacctattcttctgtgggcaaggggcaagaaggtacgtaacgagagatacaattgtatagactaaattgaagtattggaagaaaatagatgggagacaaaaggacgtccttcaacataaagcattaacgagtcccagtagggttgccctaggttgctgccaatattgtggagaatacggcatttcgcacttggcataccaatggtctcctccatcccgcaaaagtccagtcataagatatttgccttcgacgacctgcccttttataaggttggcaatgccctgggccttgacaggctgccctagttgtaagacaagcctagttaacatcccctcctcggtaatggaaaactcctgattttgaagccagcccttcatgatgacagccattcctaggaaaatagacctcgggtgtttatcgagaatccatagacccgcgtagatctcagcaagcctaagtttgtctccacctcggtcaagcgcataaaggcgttgacaatcgctgtgtgcttccttcgaaataagtttgtaagaataacctcctatgggggcctgtctgttcgtgcgcattatcatcaagtctatcacatgtcagcctctagctctagcttaacaaagtcataacacgcttcttaccactagggactagatagagacccggcttctttgagcatatttcttctatcttcgacttccgggaaattgaaaaaatgggttgcttgaatagctcccaaatatggttgcagctctcggatttcagaaggacctcgtatatccgatcaagtgtaaaatgcgtattagtgctgcttcttccggcgcacaggttccataattcgtcgtcaacaggctcatacagagggcacttctttgcatcgagttttatgataaagtctgtaagttattagccgatatggcatcgcctagcatgtacaccctttctgaccatctggaacgtcatagatgttcggccctattcgtctaaattctcgtaagaatatatcaggatctgggggtccttgagttagctttataatgatgccgtggttggagagcgtaccatgaggagcgaagtccatttttgttggtctgacgcttgcttttcttaagaacattgctgggtgaggtctttgcttttatatgcttaaatggtacttgccctattcacatgctggagctgttcgtcatcctagaacggcctagacgatctgttacattacaaaaaagttttagaagttccactgagccgatgcatttggcttgcgatggaaaagattgagcttgctcaaagctaaaaagcccgtgctaaaacacgaggccactattctcggacggataccccactgatcgcctaccggcaccgatcttgccaaaatagattccctccaatctgagagtatcaattggaatgtcactttttaatggtttgatccttacctagtgtttatcaagctatgtcgaaggatcaataatctacagagtggttttaacgaagtcccacattgcgaacaccagcaataaagccatgggtttccattgcccttcggtccactcaaactcgaagaacaagcatccaattcaaagatctcggtctttgcctaatgtttattaagaatctggaagaagtgaccgcatttgaataaaggatgagccagaccactacagttttgtacgctatctgcttcatgtgcatagtggatgtcattttcacactgattgggctttatttgcacagaccctttcatatacattcaggaccctttgtcaaattaaaccaaccctgcaagcctcagacggcccactgtatattgttccgattcggtcatcctagcgctctttgccgaaaaatttcttaaaactttccgggtccaaatcgccgttgaacagggtactgtttttcttcacagacccaccactgatcatgtggagctgagttccagcgggatgcttgcctctggcgtcgccgttgaatacacgtgaactttcgtctatttccatcccaaaaaagccatgcgcggagtgtcttgaagaagcacctatggggtaggtgggataatattaggtttttgatcaagtgagggcagcaaggagtgggacaaaatcgcaataccttgtcgactgctttcctcctcgcctcgaggaacgagacctggggaatggttctataaccaaagccaagtggttagctagaagatgacctcttaagggtttcttgatcacaactcaccttatcttgcaaagagagggccatatcctccgtatggtgctgaaaagtgacgggagggccacctcgagagtgttcttctttattgtttttatccatatcaagcaacgagaagtgaacggccgaagataaaggagactgagaaaagaatttcaagtggaataattgtagagtggacgatatcatatttatatcctagggtcctcgctaggagatcaatcacaccactctcaagatgaatgagactgaaaggactggccatttttgcagcaagtcatgaaaaaatcaagcccagccactcttaaaatgggcgtaatcacagccagatttttgtttttaggcgatctaggttcctctttctcgtaaataaaccttgccttcgacaaatacaacgtcaggaagctcaatagtttcacaatctgttttgtcgttgggtttcatggagatggctcggggtcggtttgctggcaattgaatgtgagaacgccatatagaaaagctcacacttcgctggaaaactcacaaagtggagtgcgtgtccatgctgttctctctgtttgatttgaaatgcatactggtagaggcattgtggcgttatatgaaaatttggtgttttgaagctcatataccgctggttcggttcccgtatacgggctggaagaattggggacagtttgatccaggcgttctccactttgctctcgttctgatctccagagggatagtatccagttcggaagaagaggccggagcgacccagaagaaagacagtgcatgaggccagttggtcatccagcttagagtagtgtagagtaatatgtggtaaaaatatcaatagagatggaaggcttcaagtctagcaggttaagaaggtgcctatttctactatccaaggtggccatcaactgcgcctggtcattaccaaagatctagccatggtgagtacccgcccctctctctggtgacgatggtatgctcacatcagaagcccgccccgattcctgcccaaatactctatgggccggcaaaaattgctttggaggcaatgctcttcttgagaattgcatctccatcgctcttggaatggaggccctcggaaaacctcagccaagatgctgaaatgctgctagatgcctgcaagactctgagaagcaggggatcccaggaaccctatctcgaaaatgacttacacctccacgtgggaaatatattaccccgatctcagttatggtgctgttctaatgctagcgctgatgacttggcattttgatgcttcatcttctgaagcatcgcagggcttgattgatttcttgagttggccttacgacagtgaagtgaagggaatacttcaggatcgatatcgaagcataatgtgcggaatggactcctcaaacttcgactttttgcttgtccggaactgagccctatctagtgatctgtgcaactggtaaacatggaatgtattatatctgctttgctcagcagtaaccgagctttctgaaacggttacaaatatcttcgagacgttccttgtaccagtcctttaaaacgttgtggatctcaaatccgagaaccttcccaagtttgcacctttttgcatattcctgcaggtatttggaatgaaggtgctggtaacaaagagctttctttgagtcgagatcttccactggttgttgcaaaataatcggatcatcgccgctcagaggaacgaactttgtaatcccatattttcctaagacccgtgaaataccaacctcaagcaccgcaagatccactaggaatgcttcatgctgatcgccaagctcttgaagagcaatggcatcaaaaaccacatcatcgagaccccttcttttgatgtcctccataagtgtgagtccattgggatgaaaccaaattcgtacggtcttgtttggttagagcctgtgttaatgtggaaaaagggtgacttacatgtaaacgaatcggtactgagtttttggcagaaagactagagtctttcgtagattcatgcatgttacttcgattgggatctgggcctccaaataaaagcgtttcgcgcgagttgcccggggaaaagtaaaaggaggatatgcagttcgaaaaaacacaacgaactctatgtaggctcaagcagaccatggtcttgcagtcgtgaaatcctggtcaatgattcggataaacctgagaaacagtagtttatatcatgatgatccagcagacttgtcatttctttggcatatgccactgattacaggtctaggatagtgaaagttagtttcaaccaaatttcaaattaatgagaaacagccttctaaaaatttgagcgatgcccgagatattgtgcgaaataattagtgggctctctttgatccattcttttgggcggtctcgaaagtccgaaggcactagtatcatactccgtccacgtattttaagtccatttttcgcttctctgacgttgctaatgcgcatatgagctcatgcggtgggcatatactgcgccgcaattgattacgcgtgacaggggtataggttcccaacccatacccctatcgcgcccaatcattcttattagtagattttatattgactctccttccccactatctcctcagaggactgaatcatctattctacatcgtactatcatctttgaatggcttcgtttatccataagatagaatccagcaatactatccactacgtcaccagtttagagaggcacatttatcacctccaggggatactgagagaatagacgccttacatcccacagcatatcctcgtgcaatctcaaattccactcgaaaccacaccatcccatcttctccagcctcccagctcccaaaccctttcagtgacccagcgtaaaagggtttcgctatcaggttcatctcgatcggaagatacatagataaagccattagaaagtttcatcaacaagattccttacgcagaaaagtagtctagagccgtatcttcctctttccctcaaatttccgttttagatttattattccaaagcgaaggttacctacaagacagtgatcccccaacatcagctatcccttctcggcattcagacatcatccaaactcttagggcttttgcttcgctcacacaaaaatgcgccaacaatgcgaagtagacgagattaatatcatcctaccagaatttcttattaagtgcgctttaccatattacgtattatctcagtatagatccaagttcggtgaacaagataataagatatatttcaaaaggcagagccaaccatcttcaggaacttcggcatagtgcagcttagggggtcgaggcaattaaccgccttcaaactaagagcggttaggatatcagaagtagtgatatattattttactatcaggcttctttaccaattaagttcatacggaactaacaaatgaatatagttaccccgacctttacttcattaaggtactaggcgaaagcaaccaaatcgatacccatatttaccacccatctgaaagaagaccaatataagaaaagcccagagagtctgcactcaaaccatctctctattccatacatcatcaaatacatatttagcaaaagtgtccagtacatctacaaaccgtttcgcttatcgctttttacttacaattagcctagattctccgacatatataatattctacactacaattttaatattgctctagaatcgtttgcaaaatagtacctagatccatttagttcagatgccatagataaactagaaagacaaaggctcttctttcccatacatcagttttccctagacaggcaagctaactttagggttaaatcccaaactaaaagggactcgcagcccacaagagacttattacacaaagcgcggaaaagacatcgcgttggcagcgggaccaattcaaacctagacggcccatctctcaatccaattctgtcggccaatgtacaactacagacaacctctaaggaagatcccaatcgttccaattcaaatatatcgggtaagccttccgggcaataagatccatcaacatgatactgactcccacagaccaggagagagcttccctgagcaggaatccaagccctaagggtttcccacatcaagtaacatatgaccatcgacttcggcttattagtccagatccgcactatacagtccacaggcgtcagacagcatattcgctcccccaaattcaccaagatgactcacataggtcctcaacaatgataaatgatcactacagaccaggaggtcaagtagacattatcagacaaacaatatctcctgctatcctcccattagaaccatcaccaagctttacagaccatcaatctcccctacactttcgacaagctaccataggatctctcgaacaggatttacccacctccagtagaattcaagggtccacaatcagcgaaatgctcaatatctcgaatacagcagtctataataaagtgattcttccaccgataggaaggactggcgtggctaacagattacatggcaatttagcaacgagcgatagctctcaggagctacattctcaattcactccatcgaaccaaagtttcattagcagatatccgtcacagtattctacggctggccaaggcactcaatatacaggggtcggtaagccgcaagtcgttaacacatcactctactctcataatatattatcttcattgctatttaaggaacaagaaggcccacatatcgataccgagccccagagagttaacacatcccttcagtcgcattacatactacatgatcttctagaccagtttgaacaatcacaataacagcctaattccgacataacctaccaaacgcaattcactgtctagcaacaacaaatggagagaatcagtatatacaagattcgatcacgcagtcataccaagtgatatagactttccaacacttccctaatcgaatcgccgcattcactccctagccatagttatcatatattcattttttctttattacactagaaacataaatacagtccataggcaggtatatgacatcttcgttacatacacgggttattaatcccagtggtagagggcgtccttatccgactcacagagtccccgaaataacaataagatcgccagagcctgctttactcttaaattaagatgatacctcggttctccatacagaatattcaaatccctatagctctagtggtcagcctactacataacgtactatttattacagaagatacctcttcgtaaaccccactatcaactaaaagagtccaaacccaccgtcccaactcacagtcgttacataaggatacacctttcgcaaacacttcaaaagatacagtactaaaccattgtaagaatgcttttcgtcgaccttcatcgatagaagagcatgtcgtttcgtcaggcggcatcgcttatccaaggataaaggtaaatacatctcaaaggggcaagttcagctgatcggaccctatagatacatagttactataatcagtttctcccttgatttatcgcatctttccacttactaaatatagtagaaccatcgcggggaatattttatattatcgtttcctagtcagcgcccaacacataacccctcatcacgtgccattttgtattatcatatgattaatagcgccattatttaaaagctccgtataatctcacctctactaaagtaagaagaatccaaactcctattcctctagccttcacagtgattatagctggtttccacttcactaaacaaaagttaggcaatgatcttatctcatctatttctagtcttctcaactcaataaatatcccaaaccttctctggggcaactatctactcactatttatagagttcccacgattatagatatcagtattatctcgattggccagagcatccactaatattctaacaggaagcagcttttattattccagatgatctcacccaggtcgcattatcttcacttatgagtactaggtttttaccctataaccaaagcttaggctgtccacactcagatactttacgagtcctaccggtattcaagcacctgcatattaataataagcttatggtctcgctttatcggaaatctgatatgctataggagtttgaagatctaaggtacttacctaagaaaaatccagatattataattacatcggacgatcgactcccgtcggcatctctaggtcatggccaaggacgcttctcgtcgcatccttataccgtgaaactcccttatactatgagatattgcgaggccctgattctattactttaccgtaactacaattcttcttacgagacttattagttagctattctaagctatatattagaatatatcgacggtacagacattttagataaaaacaagctacaagaaggttacagaaagttttaccataccctcaaacagggagatcctgagatatattcaatactagataagctccgactcagcttaattgaagagcgtcgcctcccaataataaatgattaacaagaccaggctaatacctcaatctccaatcaaaataaacataatttagccactcaaactctagatttcaaccgtcttctcacaatcaaatccttcagactaagtgaagtaataacctctttagtttaaggtcactgttttcccagttttcaagtcttagaagtcacaattgaaatacatgtggccaaaagcccaaagtttaacaaccccattttcccaacaaggctcacttaatagatcggtcataaaagctaaggagattttactgttcctatatctaggatcgacaaccatagcgtgggttgataggcagaaatgagtaaacacgacaaccttacgatcaggctccaagcgcgaaatatattcaatttcttagttcagccacactagatcggtatagtgcgcatcttgataggcttcgatagtccaatcatcaatataatagaagtcattcagaccgaaattaacgctttctttttatgcttgggccacccgcgagaacaaagtacatccgaggacagtgatcccaggtgaaatgtcgtagcgcatttgatcgagaataacaagtttaccaagcgtctcgctagatcctcgagtgccatcaattctcgttttaaacttattaacagcggattttgtctcagaccagctgctataatacgctttgtgattacctatcactaaaaaaacgatacagaacacttccagctgcctacgcaggaagtagaacaagccttcatctttgacatagccaatatcgccgagtagggctaaatatagtgccttagggttaacttcgaagacgtcatatacaacaggagattccaggtacaggtcagaaataatctagaacatcatatcgtcctttggcgttctatttgtagcaaaatttgtttcatactagaaagtggttatcagggttagggagtggtcggcgctaaatatcgctattagtggtaccgtaggtcacatgactgtttataaccaagaaccgatatacagctggtcgccctataagcgtatatataaactaagtcttaggaaccaaagctagctcgtcaggatcctctagataacttctaaatatttaagtctccatctagttgcttataaagcattcgttcgtctctaccatatctacaccgtcctttactaaactggaggtcgctgctagagcagtaattaatatcctcaaaaccatgcctgaattctcgaactccagaatagctgtcatcgggggattgggtctttggaattatctccgacgttatcgcactactgaggttcgatttcatgattttatctgcttgaatattctctaaataatatttgaaataggatgtcgatttcctcatcactgttcaaggagcgcccaaagcagtcaaggacaggctgcttactataccatcgagtcagttccagcaacaggctcaactctttttttacaaaggagtgggcggcaagtcgattcaaattgacatcactcctgattggcaggtaagctcagtgaccggttttcattgcaaaacatatacttatggtttacagtctccctacgttccatccgccgcggtgccaatatcggcagctcgatcaaacgccttgccttatatttccaagcttgatcttctcgtcttcaagatcaattgttgcggtttacgacccacgccggccaagaagctacgtgatgcaaccgatgcaaggacattggcagaagatctgtgttccagaggatctattaatctcacgtctgctcaaaagattgctgttctccagggcttagatgatgtagcccagctctccagaagagataagtcgtggtgggtggcaaagttggcactgtaatagtggttgtctgagtatggctcgacgatgggtctgaatggaacaaagatcagcagcaatgatatgtaacggttgtaacctgcgaacggagtcttgctagcccaataaagagccgatatgctatggtaacgacaaagtggtccaatcagctggctgcatatttctgaaagcccgttggggatacgcacggacctaggacctaagtggagaaggatatacgtaaatattaaaaccacctgaattttccgcgctggctacacttccccctctcatttcctctccctgactttcgaacttggctaatattcctctcctcctgttaggccagcgggctatgtaggagcggccatatagatggatggactacgtaggtatggccatgcttttctagatcgaagccttcgtgggtcgtgggcgagtgccaggtgggcccatggagcaacgccaagaggtaagcacgcgccctatagggacagccatggaggaaatccttgaggatctgcaaggctagaagcaatgcgcaaaggcgcaaatcttcttcacagtttgagcaaaagcgcatgttaacgtttatgtctttgcggcgcatgtaagagattacttataaaataaaaagccacaggtgcaaatctaatttgggtctttcttgacgaaaatgattgggagttccgaaacattctggggagcagaaaagggggttcttgcttggcggaaggtgctcaccgggtgataattcggccggtccgaaactgagcaattgtactccatacttgtaggagttgcgcctacagacttgcaaacttagtgcagcttcgcttcaacaccacaccccaattgtttgtgagtgccgaggtagttgagggactgctgtcacggcctaccgttgattctcaattaattgatgacagtctcttgatcagatcaaatgaactagtctaggagacataaaggcctacctaattctaagttcaacaaaggttagtggagaaacggaggtggtgatactgtagcaattaaaattcaagtatttaaatgttttaatatgaggccgttggaagtggtgagaaggtcgtttagacgttgtcctctctatagaaaagtcgagttgattgaatgattggttaaatgtggtcaacgtgaggttaaatgtggtcaacgtgaggaaaagcaatggcgggcggtgaaattgtgaccgaactacccgcccaagattggtcaggtattatagcataatcggcttaggaagcctacaacttgcaaattgagagaagttcaactcgcaaggtatattgcataatctgataaatttcataccagaaattgcttccctcctgttttcctaaatccccaagggtgcctgggcattaaacgctgcacgtgatgaatcaattattgctatttcagatagaccgcatgatggcaaacctaatcaagcctagcggcactctgaacgacattgagagagacactaacatcgtggtatcacttatctccatcgcaaaccctcgcgacaacaatagcattgtgggtggtttcctccaaaaatatatacggaggaaacaaatagagccaaaacacagttgtcgttccccgaacgacacagtctgcttattggtgctcctagggtattacctatcattccccggagctatacagtccactcccgcgagctggagatcccctgggaactatgacttgactcctagaaacgattaagagagtgcctaggagtcatgttatggattctgggattgcattcgatcccagaaaagtgagggtcccactcgcgagataaaaagtgggctctggtatgggtaattaataattagaatgtaaattaaaacgcgggctaagtgtaaagataccggttgaagagacattgtgttgatgaacaataaataacatgcaaccaacaattgtttgggagtcgaccggaagtacaatcaatattaatgacgccttccactataatcagtacagtagaataaacgagaataaacacatagtttgtaagacatcgacgagtagtacaaggcccatcgtggtgagaaacgaaggccaacgtttgcagctgttgattaaacgatcggttgttagaaatgtgagggttgaaacgaaattaaataattcattttctttttgagtaactgaaagaagtagggtgtttattaaatatcattggctagacaactgtctccactccaaatcagcgcattttcctaatacctaggcatcccccaagtctacagcaaagaaatcatttcacccaggttagagatgtcctgggcaagcccggtgccaagcctatttctgccatattttccaggcggcatataatagtttttcaaccttcacgagagcttctcattaattcgtgtactgacttttccatacctctagaagccactttgtctccaccacggttgaattacgtacccgataagctgactacacaggctatctactttcccctatcctcaggcctactaggagtcgtgaatgtcttcggaatttacagcgaactcttgagtaccctttggaaccacaaatcatcgtgctttaccctcaggacctcagtgacttcgaatccattgagataatgactgtttcaagtcatggaccgaggatatggcaaaaaataattgtttgcatagttctggtctggtggaagtttcgcttggtcgtacaacttcatgtatgttgttcaggttcaggtgtatctttatcaacctgctccagatcctgatctgttactagctttggggctggatagtagaggttggctttcccaaaaaatgggtcgaggagccggtcaataatattatactaacgcatcaagctgaggcctagttatgctagaattttcatttgtgacagctaaccgatgtgtaaacattgggtgtctccgacgagaaacggtcaactgcactgtggggttaaagcaacggatttttttattttttatttttttattttgtatttattgatttcacaattggcatccctcaaattcagtgggtaaagatctgattactcttctggactcggatttctgagccagctaattgtttaatcaccaactgcaagtctactcttagcctttgaccctcatgttctcaccactcatcggctaatcaatgacgtttcgtatattctactaatatcatggaaaacatcgttgaaagtacaaatttggccaactttctttctgttgcctagtattctatagccatcctgtgttcctaaatctgttgctctttccatctgaatctagaatatcggacatgggagtctgtattaccgaatttgggttagcgtcactctgaaccacaggaatagagacgctaagagaattaagcattagtgagtggtagccaacgatggctcagggaaattttgaggcatatgatgagaagttctttggctcaactttttgaggtcgatggatcttagggaagatgagtagatggttgatctaccatataagacatgtctccgttcagaagattatgcatacgtgctgatattccctcaattctaaaaaaaagtacggtctagagagtgggtacataaggataaggtattccattacatttagctcgcgtcccacttgatacggaataaaggatatttttcgcgggaatcagcaatgaagaatgagggcatgaatattgaagcttgtgtaaataccccaggggttatatccgccgcttcagatgcctcatgtttcaagtgatgataatgaaggtctttttttgatgtgagtggttatctcttcggcatttttgatagatttatgcgggctccttggttctatggtacaacgaagaataagggcgtatatattgaaatataaggcatctaatgcagtgtatctacacaagcttcaagtgatggtaatgaagctcctttttttggatgtgagtggttatctcttcggcatttttgatatatttctgcgggctccctgattctactagtacactttgccatcaacctgctcaaaactgctgatactgtcagagaccaccaggaccaagcaaggcttgtccctataaatacctcgtagacgtcggccctccaagtatttttttatctaatgatcattgcagattgtgtcaacgaacaaagttcagcgactcgtgcagagatcctattccttacaaggccttaactgcccagatgagtcaggtacgtctttttactttcccatgaagtcccctggaatgattgtatgatgtctaaccgcatagcctagagcataccgaagcgtgttttgtcaaacagacggacagcgagaggtaagcttattctctctattttgaaagaatttcgctgactactagctttattgtgcaccttcctcacagcgaaatgacgtaacatagttgtcgttcgaagtaaacggctgccataggagggcagaatgagggcctcgcgaatgatgcaattgagattgtgatctcgctgtggtgactgtgcttgaagaggattttgcaggcgggccgaatttatatatgcactgacgaggcaaatctaggtgccatcgaaacagcgtatatttggaaacggaggctctgaatcaacggccaaagtgtctttatatgcctgaggcaccaatcgactctgcagtcaagggtgagtaagctggatccctccgtgacagtccgttcctctcgccaaacagcgggcggcctactctgttaacttcattcgattatctgctgaatacttctttcaacaaaggaccgaggaaacaatcgctgaattacgatgtcagcttgaagaataacaaaggctccgagaagcagcagagcacagccagggggaggaagaacggtgactccaacccacaccgtattggcattctcggtcgccgtcacatctctgtctagagcgagccgagttgagtcggatggaccctcacgactcagggcgaggcggccgacccagtgaaccgaactttgcccccagtgcatagtccctttgaaaccagagaaaatacaaattttggtgagtgctgcggcctcccttttgttcaggaagggatattatgtcatactttgagatgctaaaattaactagttagctaaccaatagaaacattgtgtcattttccgggaaatacttctaccggaaaccgtgatcggctgacgtcagcctcctggatcaagcatccaccagtcgagacctgtcgcgatcttctcaagctattttcccctccgacagatcgatggccgacaacaactccccagattacaaggctctctttctgcaggcggaaaagagacgcaaagaggccgaagagcgacagaagcaggccgaagatgaaggaagacgagagaaaaggaggcgggagcaagctgaagagcgcacccgaccgaccactttcgtggaattcttgcgccattcctacaacctgctctcccggccgttgagagttgagacaccatctcgctcgactaccgggaaaataccccttccgaccgggaaatattgcccaacacaattggaacactggaccgactgctcagcacagcagttagagctctacaagtccgtctacagctacattcagctgacaccagggggtgcgccacatttgttctcatctttgcatgaggtagaaggattaggccgacgactttgtcgtaagcctataagcagcgagcaagaactcgaggcctatgagcgatttaccgtggaagaacatgtccacaatataattaccgagttgtgcaaactacccgctgctcgcgacgagttcggtctcggcgatggaatccagttcagcaatcatatgaattccttaaacgagaacgaagctattgaagcggatatgagccaaccgtcaaatatacaccacccaagacctgatcagttctgcatccatcgtatcgacgacaactctaccactctcctcacatctatcgagtataagccgcctcacaagctctctgtcactacccttcgtataggcctccgaccaatagacttatggaaggatatggtccgatcaaacaaaatcccgacagaccaggaagcgaagctaaggtacaatgcggagcgacttgtctgctccgctcttgtccaggagtatcatgtgatgatccaggaagggctcgagtactcctacgtgaccaacgggattgcccgggtcctccttcgtgttccacacgatgatcatagcacgctttattacttcttatgtgatcctaacagcgaagtgagtgcagaagttgaagatagtttccaacaaccgaagacttctgtggccaggacactatgtctatgtctaatagcattccgctcactcgcacgcggtcaggaatagagaaattctatacgaccagagattcctatttggaagaccagttttaatcacactcgctctcacattcctacagcggagcttcagcaaacccttctccactccaatagcactattctggagtatacaagtccagattccggttcggcttatgaaccgtcgtcatccccaccgaattctccacaatcagcagctcgtcgactgtccactaggtctccggccagctgtgcaccgtcgggtgtacagcatcggtctcagtcgccggactcatcgggctcagattcgaacaaagcaacaagccgcaaacggggcttcagccaagttgcatcatccccatctgtccaacgagcaggtcgtcaacggcacccagggcaagatcgcgatacgaaattctgcacccaacgctgtttactcagattacagtctgggggtattctagacaactgttgtccgaatgtggtgcgccatcgtcgaagcaaagacgttcttcatcatccaattacctcagaagatttggtgcgtttactaaaggcacaactggacgaaaacattgacagatacacaccccttggaggttgcggggcttacggtgcgccgttcaaacttacatgtatcgtatatggctacactgttatcggaaaaggaactacgtcggggctgtggaaagatatctctcgcgaagcgcaagtataccaaattttgcgcaaggcccaagggtctgctatgcctgtatttctagggacgatcgacctggcaaaaatttatttccttcatagggctggagagattcgtcatatgctcgtgataggctagggaggcgaaagtacaacgtcaatagaactcacgcctatccttctccaggagatatataagtcgaacagagagatcaaagctttagaaatcatccacgaagaccttcggcgtgataatattctatggaacgaagagcttaggcgggcgttaatcatcgactttcaccgctctacgttaaagagtcgaccgactttacagcaaccacgagccgtaaaacgacgactatgtcaaccagagataggagatccaaaacgtcttcgtgtgacgtgaggcagtttgcttatttattagattagagcaatacaaatatacatgataatgaagcataaagcatttccggcccgcatccgcataaatcagtcagaatttctatctattataattcttgatgcccacttctccaacgcacctacatggcctctgatgatatatgattctatatgcgttgacaatcacgaattaatcatccaatttctggctctagacttaacttttgtatgataccatgaatcacataaaaaccttaattcaactataaagcttcaggaccgatattatagactgtcgtgtactaaccgaaaatattacaataagcgcccaaccgctcgacaacctcgaggaacgagattatccacataactttcccaggtatgctattagacatacattccatcagcaggcctctctctgccaaactcctttaaaaatttcttatttgattcagcggctaacttcaagtattcgtagttcacctggttgacgtcagctttagcgagagcgtgtgcaattgctgcgacgtttttgatctggttcatgattggtcagcaagtgagatgttcagtgccactcggatacccacctctcgtccatttagagctaaagactccaatcgtcgaagttcgtgctcctcaacaatggcaggtccttgtatcgtacatgccttagacagaaaagttgaccagagatctctacaaaactctctcgttaaattttcatactcaatgatcaaatggatccggctaagaattgcgtcatcaaactagataccccgatttgaagtcaagaaaagaattccttgataatattccagctttcggaggaaaatggtcacaaggcgattgtaggtgtcatggtaagatgtacactgctccataaacgcgtctgcctcatccaagagaagcacggcattaaagtatttggcgatcttaaatactgtttcaagttgtatctcaagcgcattagaatccccgtggttaacaacaagttcgcctacagatatctagaaaaatcagtgactctccaaaatcagccgagctggttggttcatacagaatagagggggagcttgaaatactccgaggttaccttaaccgtgaaagtctttccgactcccggtaggccactagcacaagttaggttaggaagtcttaatcttatagacgctttgccgatatacttcagaagaatgttaaatccctggcccttcctatcaattacatcgtcgaacggtaccgccggtatcatccctaggcaggttttcgccaataacaagaggatggtcttaatctctgaagggatctttaggcagtcgaacaacttaggtgaccaaaccacgtccctaagagcactaactacacactccactggaatcacattagccggaaccaaaccattgtcagtcgtatcacatacagaacattttctccttaaaactgaaacagcaaactgttgggcaggcaaccagtaaatcggcctcgctcagcttctgtgcatccacaccgtctcctcgcattttctccttctctcgctcacagccctccataagcattgcaccaatatcaaggactgcaattctatccttatctttgaccctaatgtcgcggagtgtcggtcaggagtagtttagctgcattttatggaaaaatgcagtatccactgccactcgactgttaatattaactttaatagccttccccttattcataaagaatgcgctgcctttacagtgccgaatgtgtaagccggccaaatcccgaaacttttgacccctctcaatcaagactttccggacttaatcgtgatttagatagtggtagagagggaaggcctcaagagtctcgatcggctttaacccccgaaactttgcaacacacagaaagattccggcctcaccgaacttgactccgtcataatcaaggaatcggcactcgagattcaaccacatctcgtcattttgtgtcatctcttcgcccgtatcgaatacgacacatcggggctcttttgtgccaatgcatatggtataaacatggcaaccaggcttaaaaagcgcctaaagaaggtcatatataatataaccgtgctgtaacattgattcgagacgctgcgagatataagcatatacgtgcttgaggtggtcgataagcaggcggagctctgcctacgccgattcatagtccgaactattgtccatattctccacacatctgtcgagctctaggaggaaatggaaaaggacggtttacttaatctaaaccaacgtcagcgatgttcttaggcattatattctatctcaattaccgatggcttatcgtccatcaggctaacggccttgatatcgtgcagcatatctcgtaggatatcgcgtaagccttccgacttgatatctataaatggcactacctcctcggacgtccggtctgatcatactattagtaggttttcggtatggcatacaaaggtgtcacataccaacacgttcacagacaacgaatgcatacttggcgtagtcatccaggtcattcctagtctccgttggctcggcaatcttatatttacatgcttctttgtcccagctaaacccgtgtcagctatctgaaaaagtggaagggacggttggctggtagctcatacgtttccataactgttttgaattgggattttgatacccatttctcaaacgacttgaaatcatccggtatagtacagatcggactctcgagattaatctcgcctaccgcctgaacattctcttcctgttcgttgctggcagaagaagaccgagcgggcttagttgccaaggagagttcagctgacgtacattcatcgtcggtgagcttgaccatcaaccgcttcagtcgaactatatcgagacctagtggggattggtcctgggagacaggagtgtttggaggttcttggtcggcaagatcgagcagcgcgttctcaagaaacgcactaaagagatgcatcagatccttcaaggtggcaggaggcatagtcgacaccttcgttgggctatcgggtggcgtcaagccttggtggcaggaggaggaagtgttcagtgccatgttgtgcaatttgaacgactagaagtatcggtgcggtatggggagctggtatgaagtggcccaagagactaactgtaatgccaatgatgaagaaaggtcaacaagaacctgagaaattgctccttcttatatgttcgatactccggacttctgtgtgtttttcttgggatacagaatctctatacttgcagctcaaggattgcttcccctcacgtattcggcgtttagctgcatagggctgtgcttcatggtgcatagcatatgaagtaaataccattctcaattggataggttcggaaatcattcagttggtggcgtcgcttttactacttctgtcctggatagacaaaatcgtaccctcgttcttaggaactaatagttttagaaccccataaaagtgagagggatccaagttagtagtctaccacttgagagaaaacttatgtaatggcttgtaactcggtatatctgccacccgagttaatccgactgacgtgggtccttgaggatcctctaacttcacgtgcaaggacctcaaaccaacacctgctcccaacaccatcagaactgctattcctacgtttggactatcgccatcttaacttgggagtctctgggatactacaacaacaactattgacgcacaaatacgcgatgcgttgcgctggccaccgttgacttgctgcccaatctgggtgtcataccccgcttctcttcaaataacggtacgaaaagtcgcaccaggaaagaggacgtcgaaaaaaaaatcccgttccccaaattgaacaacggtgctcagtttgctcgatattcacatttgcactatggcagttaagctcaccatcaaatccttattctacgttcttgactgacacgctttctcagaagggtgacgaagccctcgctgggcgcgaggaacggaatattgctagccatcgatttcctccggacccagaaaatgacagaacaatcaaatttcaaggactatacatatcggtattcaacgaagacacgcaggatcgaaaaacactcgaggagaacgtcgccgagtacaaaggtttcgcggttccgaagggctacacaacgtatgtaaggggagttgaaattgtctgctgggtagtttaggaggaaagtgcatgcttcacgccatatatgtcattcagcctatacccatcattgtgaccaacccagatagtgaacgatacgtcctgtgtttcgtcctttgggaaaagtgtagccacacaagctattgtcccgtacccgtgagacctttcccacttccacaacgcactgttttggactgcagcccgaaatggttgcggtagttgcatcaccatcgtacttggggcatttatgaacatgtgcttcatcactgtagagaatcagaatatatccggccacacaggcgatatgccatacctcggttttcatcatcggggttccgaggcgcagtttgaactacctggacgggcatgtcgtgatcggtgaactcattctactgggacggattctctagatctagctgagtgttagttccggaaatgctcctcgaagggtcgtcttaccatgcacaagctgctcaagaccgtagcacccctgaagttccccatctttcagtctagacagtgtttgacatactgcgtcaggccaattcttcctgtctcttagctcaatatcctctaccaggcagtcaaagatctcatttggcataaagcatggtccccatgtagttggaggataagcaatagcccaagagacaattccatccgggctaagttgttgaatcctagaacatcttttttggaccacacttctcctccattttgtatccttggaatcgaactcagattgcggcgacccgcggtagattaacttcatgttcctgcggaataccgctggattgcgcaaccgtcctccgctgagcactgtggcaattatagattgtgctttgagtctgtgaggctcactgtccttccatgcctgctccatccatgggcgcttccgtaatcctgtttttgattcgataaccacaatgatgtctttgaggtttgcagcgatctcttccaacgtttgcaggtcggtccctgacaaagaaatgtcacgcatcgctaagttcaaggcacccagatctctagcgatggagcttaattgattgatgatggcggccatggctaattttggatacggatgccgaggtttagtagtttgaatggtgaaagttggaagagtcaaagtattatgggccacagttttagagggtgtctaagtttatggctgtctaagtttgatgacgtgtaccgtagttgctggagccaatggagtgagtggtggcatagaggtagggttgtttgtgtagggtgacattttgggacttcagcagcggatcattatccctcaccaagaatatcgcccccaacctattatttcacgtgcccacatcacaatatcgcagcctggaatgataatgaggaagcctcacttaagaacgagctgcagatgcacgcacccttgtcgggcactagcctcttatgtttcctccggcgtgcgcccgagcgcatgccggaatctcaggctgcaaagccacgtcagcagaccaagcagccaaattgacttcgtccgtgtctttcagagtggctgcgcatggtgcaccaggatcatacttgcaggggtgctcctgagggtcctatcttcagcaactgaaatattagattagtgaccgtcattaccataactccgctgaatgccatacagcattttgctccattttaccccaaggtgtcgacaaatagtttctacatagcagagcagtttatgtagatactgttgaggttctaggagcaaacctctccactcctgagacttccaggtcctcgatccttgcgtaggaaaatgtgttttgctgaagttattaatatatgagcccttgccacggtatcggggatgctattccagtgcaccgaaggttagtacaactacagcagcccaatgattgagtcggttatgcctgaagctaccgtggagggtctgaagcatctctccattgtgcttgaaaaggctttgctttgcctgacctcaccaaccatgaacttctctggctaattatcagtcggtaaattccaagagtgtcataggcataagatctaaagagatctaaagctttaccgcttaaaccacggaaatcggggttatattcttatcgtggaagaatgtctggttctggtcctactcaccacctggaaaggcatgatcgtcggggattgcgggatcgattttttcattgtatagaagctctccagtctgggtagggtgtccagaattgacagattgagggtggtgctaaccagcaataacggcggggtccaagtcgcacgatccaaaaccgggggatcgatactcagcactcagacaaacattatcgggtattgtagcagaatcgatatcttcgatgctccgtagaccttccaactgcaaaaggtctttagagtcgaaagtctcgacgtgaggttggtaaaggtggtaaggctcaaatcctccggctcgtgtcgagtgggttgtgcgtcagaatgctggccaccatccaagcaaacctccaacggcgggcgggcaggaaggggatgccggccaggtttgtgggcatgacttttttgactcttggagacggggtcaataggattagagggaggcggggtgggagtcatcgagacaagacttgggtagcggcaaatatcaagagaatctctcagaggctgggctttgtcctgaaaaggattccatggccggaaggattccaggcgaaaactagcgtttgacatactgtgtggaagagatggctgagaaagtcttcaagatgtggtggaagtgggtttgaattacagttttgtcatttgagtggaaccgtagtctctttatagacggtcgcccgtgaggcggaatccgccttctacctagcgcagaaatcccgaccagcccctgcaatccaagccactgcattcaagaggcgggacaacaccagtttcacaaccacgggatgtagttcaccggcaacaattcccgctaccctcgctgatgacatttgcgacgtatgcccacactagtcgtcagcccgttctccattcggtatgtgacggtacgatcgtggcatggttctcgcggttgcagtccagcattggccgcatgatgcagcatctaccgaggtcaggcgagtgtgcgatattttcgctattggctcgcatcaccgtagcatgctttcgaggttcaccgattgggtgcggagagaccggagaggccgacgatgacgacagatgggaggtcgaggcactcgcgaacaagcggccgagtgtaaatctgcgacgctaagggctatgcaatgtaacctcaggtgggggcctgagatggggcggatgaagcggagcatgcagcatcgagaagacttcgcaacaaggggggtcagcgaaataacagacactcaacaggaaggcctcaccagcagaaagcaagcgatctagatggaattagagacttctttggaaaatggagtattgacacacacagtcgtgcgatacgatgcggtgaatggctggatcacctcagtgtttctgctcctgagcgactggatagcactgcagcctacgctggtcagaacgaccagggagtcggatcgagcggcatctctggtaaaatgaaagggggcagtgcgtcgggctgaaagcaaatgtgtagtagtgggtgggggccagagtaaaagaaagggggaggcgatgagtgcaagatagagaggcagaaaaatggaaaagtgagagagagaggaaaagagcagcgatgacgggtctttttaagtcggagagcactgaggggaggttacgtgacggcgtattggggcgctaaacccaaaaaagcaaaactaaccggatgcagtaattcacaggtccctatattacatactcaatatctttgaaagacctatagctagcacagccatatcttggaataaatccatgtatagttcatttcttttcaaatctacggagacaagcgcaagaatgtatacaaccatgtacaaaacccccctccatagaaacaatggcttatctctatgtagctttacatcttgtatttcagagcttgtcatgtggtgaaacgctaaaagaaacccacagcataacctccccgtcggccgtttaagcataaagtttgaatgtcgagctatgcacgagcgaaaatctcggccggttttgaaattgacccctagtatcatagtatatgcaagtaaggcgttctagttggtaagattgagtgagattgatgacagattcagcacacttgtgtcaaatgaggtaaggtctacttcgtataaggctgaagtatagtctgacgccccaccaagtacctatacatacttgcttattctgtcagcttcacttcatttccatttccttgaggctcttctgtccgacaagtgctaatgaagcattcggttttccatggagggcatctgagagtctgatatgtggttgatatatctttccaagggttttcttactacatgtgttacaatatgcctaatgtgtaagaatatatttggtatctgtgagtacaaaaagctcaggattctattcccctttcttccctccacaattgatggtgaagtatcaatgtaaaaagtgcggagtaaattaactgatggaaaaatatattccgcagaattaccccggatattgatcctttgcggggttagacgaactactactagtagatcgtctactcagagatctatatattctactacctagaagaagcatgccatgatatcctacgcaattctaccttcctttatgctagacctaccaatccaattgagtagcaaaaaatgattatcctgacgatatgcgtcctagccatcgcctttggcactattttcgccagagcaagtcctctgtcaagacccgccaaactcaactggtcatcgactaaggctctgtgagtatatctagcctaaatcttgcaagcagcactgaccccagaccaaagaatcgcctttggtgactcctacacctatgtccagggaaccatcggacaccaaaatttcagtttcattggcgaccaattcaacctcgcatatgatgccgaagccctgctttccaacaagatagtccaaaatcaagtaagcttatatcttgacacgattgaatcaaacacagcaccactcggatattaacgtcccacgtctagaccgcaaccgcagaaggcggtccgaactgggtcgaatatctcacaaactgcggcatccaccaaggcctcacctctccacaagactgcaaaaagcaactctgggatttcgcctttgcaggcgccgatatatcaaccgagtagtaagtacaagcacaagtacaatcaacacacattttcgagcaaactcaactaaaaaccaagcacaccaccacaccacaacttcacagtctccctcctagaccagataaaccaattcaagcaatatggccacccagccctcctaaacagtctaccaagcttcacccaagacaaaaccctagtcgccatctggatcggcatcaacgacataaacgacagcgccaagtacgtcgtgaacttcccaaccttctacaaaagcctcatagacacactcttcacatcagtggaaatcctctataacctgggctacagaaactatctcttcatgaacctgccgccgctagaccgcacgccagggaaccaagcaacgaaggatccgagtccgaattcaggtcgggtggtataatgccgcgttggctgatcatgcggctggatttgcggcgaagcataaagaggcgcgggttatgatttttgatgcgcatgcgaggctggcggctatgcttgatgagccctacaagtatggcattgttaatacgacgggcttctgtgctgggtatgatcagccggatattgcggttgcatatgagaagtatgggtgtccgacatcgttagagcggtatttctggtttgattcgggccatatgactagccatgtccatgaggttttggctggggaggtggaaagatggttgcaaggataatgaatggagataggcaatagctacatgcaagcacgttctcaggctgtctaccaataactttgacaagatcgagaaatacttggtggaatgtttgaagaataataataatcattattgcagattgaagtcagagacttcagcaaacgctgtcatgaaactttttaactaatcgacatgtatggactcatcgagagaactgatgaatcaagatccgagactgtgaaaaccccggaggatagagacggaacaaaaactaagtaaaacttatctatgacatcgaaaataacgccgtcctgcccgagttacgcatgaagtcaaaggaatgggaaagagtctaccgggatcgcacaatacaaggcaaagtggctgactgcacggggagcagcagcgaagcatctaccaacgacggttgccgccgacgggagcagagttggaggcagtgaaaccaccaccaccaccaccgccgccgcgaccaccaccccagccaccacggccaccaccacgtccacggccaccccagcgaccaccaccgccgccgccgccgaagcgaaccatctcggcaagacgggggtcaacctgctgcttagcttcagtgaggatagtgatcaagtcacgagcctgcttagagtctagagaaggggatgtcagtacaacttgcgaatgtccaaaacacggacgaaaacttactgtcagtggtgaagaaggtaatggcggtacccttggcaccggcacgagcagtacgaccaatacggtggacatagtcctccgagttgttggggtaatcatagttgagcacatgagtgatgtcgcgcacgtcttttcagaggaaattcgttagcaaatagaacattagtggaaatatgaggagtacggccatgaaggaccctttctccgtcgtgcaggacttgatgcatcactgctctcttgatgggtttctttgaagaaaatcccaagggaagcgaatccatgggatggcggtgttatcatatcctagagaaaccttggaaatgcagccttcaacagttcaacagttcaagaacaacgctgtgtgagagaaacttcgactcttctacgagcctgtcacacaagagatggagaatagagaatcaaagccaagctagaatgcttgctgctgtgctgcactgtgagtccaaggtactcttggcatgagaaccatttaggagaaccatttaggatgaccaaatacgcctggacgcggcgtatagacgccgacgtgcttcgagagagttgagcaccgtgccattgtattacacaacgtcaacacgggtgagtgttttcaagggccccttaaggggggacaagaaggggggaggggaagaggggggaggggtgtagtttgttcataccaataccacgcgaggccacgtcggtggccaccatgatggggcttttgccttgcttgaactcgttcaagacccagtcacgctcgttctgctgcttgtcaccgtggatggctggaatgtacgttagcaccgtacacatgtgtcaattgggaacccaaagaaaacttacaaagcgcgggccagccgtcctgacggaggaatcgggtaatctcatctgcgacacgcttggtacctgtgaaaatgatgcacttattggagcggtcctccataatcttctcaagatgcttgatcatcttgtcacgcttctcaaagtccgagacgacctcgacaatctgggtgatgcggtggttggcggagagatctgtggagccgacgttgacttgaatgtagtcgttgaggaaatcagaagcgagctgacggacatccttgggccaggtagcggaccacatgcaagtctgacgatcagggcgaatttggccgatgatcttgcgaatctggggttcgaaacccatatcaagcatacgatcagcctcgtcaagaacgaggtaagtgacgcgacgaaggttggtacggccagcctcgagcatatcaatcaggcgaccgggggtggcaatgcaaacctcaacaccgcgggagaggtcacgaatctgaggacccttggggacaccaccgtagacacaggtgttgcgaatacgggaggactttccgaacttggtaatctcagcctgaatctggacagccaactcacgagtaggagccaagaccaaaacaatgggtccatcgccgggggcgaggagaggctgagcgttgatgtgaacaatagcggggagacagtaactcagagtcttgccggaaccagtctcggcaataccgacgacatcgcgtccggacagagccatgggccagccctgggactggatagcagtaggagcgtcaaagccctgagccttgacctcagacaaaacgtacgcggggaaaccagcctcgtcgaaggtttcaacgggacggggcacattggtaccctgaatagccatctccttctccttgcggaaggcgataatgtcttcctccgagcgcgcagtgacatcggggtgctccttgtagaatgacttctcaaacttgggcatggtgttgggatctaagtggaaccaaagttagtattgcgtcaacaaacacgcctgtcattggaatcaacttaccccagtcctgagtcttcaggccggcgccgaggttgttcatgcggtcaccaccggcagcaccgccgccgtaaccaccaccaccaccaccaccgtagccgccgccaccgctgtaaccacctccacggccaccgccgtaaccaccaccgccgccgctgtaaccaccaccaccggagccaccgttagagtagccgctgtcacctccgcgagagctagaatagcaaagttaggacgaattcttctgcgatatgcgaggtctctttggtattggttgggagaccacgataggaatcccagtgcccaacgtcataacaaacaactgcaggatcaaggcctttgccagaaaaccgtgcagttgatgagatagacaaagaagacaaagaaaagtctcgatgagaatgaacttaccggtaggagtcaccgccgccgccgccaccgcgagagtagccacctccgtacgacatgattaagtctgcgaagggttgattttagggagagagagtgattagaatccgaggggaagtatgaagtaggaagagaagagaaagagagacgagttcacaagaaaaggtaggaaaaggttgggaacttgaatgaaaaggaaggagaaaaaataaaaaaaaaactgccagggaggaaggcgcgaggaaaaattagattaggcttagcgccctttgtgttttccttggtatcatcacatgaccaggtctggagcaggtgcctcccagaccgcctgcctaaaaagggcttagtcatgactcgccgctttcgtcgcgtctgtctatcttgcttcttattggttgttgttatcgacttcaggcagaaaatttagaaattataagattcaccatggataccaagggggcaaataagtcttgagtggcgataatgtttgacggcaaagtgaggattttcgaaaacaaatagactgagagtctatagataactatttgataatgcatagcagcatgaaatatcactagagaaaacatatcatatgagcgaaaaaaagaactatgggtaaccgaagtgagacgaatagcgtcttgccctatcgtcttgaatcggagcgcgattatcttgcctgggaatagaagtccgcacgtcagtcacctccggattctgaccttcgagcccttgcaatctacttcaaacagttcatagcctgaaaatgctctcagctgaatctagctggacgcccaatttttatttccatagttccaaggtttcactaatatctccatcaatggcaagaaacgtgagaatgtattgtttatgacagatgaaatggaatagacaatggaatatccggacttagatggagtgatcgcagcaactcgtaaattgaacgaggtgtagatagcagcctgagatcttaaatcctattgctcctcacctccgaggcccatatcccagaaacgaatctccaattccgtagctcgaacaaagatcttaatcaattcttccatgcgactgggtgacacacgctgcatgtgatcctctagcaatgctatgacatgaaatgagtcagtgagatgttccactcgttcttcacgatctgacttacctgaacctagtcgcacagcctccgtatagtcgtcggcaacataattctcgatccatttccagtacgtgttccccactcgaagagttttctccgccgtatgcaatcgtcttgcaatggcgccgtatccgatcaagcatggtgcgagagccatttggagagccagccagtcctccgactggcctacatccaaaatgtatcggctgtatgcggtgcaagctatacatatcgagattagtacatctgtcgagtttgtaaaaaggcacgatcggcctaccgatagtttcgggtgtatcttccatctcctgcttggaaagaccaaatgaggcacagtagtcgatgtgcaatgccatttcccgctggatgtggaggacaatttgggccgactggagggattgtatcagattgtccttgaaagcaagtatggtgagcacttaccgctgctattgaatctatgctcttggccttgtatgatgcaagtgcattgcttcgggcaaattgtacctacaggttgaatcatgataagttgaatgccttcttccaaccggattgaagatggctgtctcaccaggtagagataatcttgcacaagatacgccttgaagcgtgcaattggcagtgtgccctggcccatgccctcgacaaactcatggtgggtgaattgccgccatacttgctgcacatcttgacgatccaagatgtattcaataaatcggccgctgaatatcatatcgttaggacttagagaatcaaaagatctagggaatgggtcacatacggcgcaaagggcatagtgtatgtggagtggaaatgattgatcggcccgctcccttgacctaggtcaatgctcgtcttgatccctatctcaacgaatcgcacggcgcttcggaccgctctgatcatgtctttaccggaagccaggtttgcagcaattgccgacgcaagtgagcagcccgtaccgtgggtatttttggatgctaagaactcagtctcaaataaggtggttgtcgtcccatcaaagaggatatccacgactaaagttacttctttcgggtcttgagatgtcttgagatatttcgtcaaaggaaggtgacctcccttgaggaggaccgccttggggcccaatgagcaaaccttcttagcaagatcaaccattccctctaggtcctttggttcggaggtctctgctccggcatctttcaacaagagaagagcctccgggatatttggtgtcagaattgtggtcaaaggaagcaactttgtccgtaattccttgactgccttttcaggtagcaactgagagccactagtggaaaccatgacctgttgatgcctgttagagtgacaatttgagaacaggacattgagcataccggatctagaacaactacaggaactttgtgagcttgtagtgtttctgcgatgacatcaatggtctcagcagaggagagcatgcctagggggtcataggtcatcagtggcagttctagatggaaaaccacgaatcatgaaacgcaaatgacttacccagtttcactacatcggcaccaacatcttctagtccagcattgatttgctttctcacaaattccgaggggacgacaaagatgtcttgcacacctagtgtgttctgtgccgtcaacccagtggtggcagtgagagcatagcatccatgggccgcaaggaccctttgatcagcttcgagaccactggaacttgttagagctttgttctaaatcatgatatagcgtaaatgatagggatacaaggtcaagtatcgctttggagataagttgatggggtacctcatttttttttttctaaccggtttttgcgagaggatatttagacttacgctccgcctgaactgtccgatcctgcaatgaccaaaacccttttgacagacatgattgaaagagccggccagaaattgagaaggatatctatctgctctgcaatggatcaagctgaagtgaagaatgacggagtggggtgggcatccatcatgagaattgggggtggggtgcttaagtaacgataagacagatagatcttgatatggatgaaatattaaacgtccactcgagacatttgtagaccctaaaatatgcaattcgatttaatcatgactatgctaaacttccagaccccaatatccttagatatttacaaacacccaaaatcatacgccgtcggggcatctattgtaacatgaagcggaagagaccatccatctcaacccattgacgaccacacttcttcaggtagctatctaccacccccttgatcgtaccgaatcttgtgcgattgaactctgcaagggcggcaacactgtccttcttttctcctgtctctttctcggcagcgaccttagctttttcgacatcccagagaccggcaaagtagagaagctggttgtatacctctttctccgagtactcgtacgacatgcgacctagacagccttctgcacgacctcggggacccaagcagcggtgtccataaacgctgatttgccgtgtgcgattgccacatgacgaatcgtcacagaccaaccagccttcatagtatcgcgaagtctgttggcggatttggttctccacttgggcgacaattgtcataaccgagaagggtttctggcagctctggttcggacaaacgattccgtgcgcagtgcacatgtgcgatgaggtcaccagaccctcatacacagattgttctttgcagtatcggcatattagggacagtcgcgtagaattggcaaaccgaaccgagtccgggatctgggactcgagcggggtgacctcggcgttttgctgactgttggaactggaggtattgatctgatatttgcgagtatcaagacccaagcactcggcaagacgaacggcatcggtgccaggaattggggcgcagagacgctcaattggagggaatatttgcttgagcatgtagaactcaacatctggcttgagccctgaatcgggcttcagcacatcctgcggggtgtatgatcgcttcgcaggagggagagatgaggtttcagagtctccgttggtcacaatatacgagatgacgtcgttcggtctaactgtcttgccccgggcaatttcgcggagagcgacttgtgccggtggcatgctctctttattagggtactcctggggtcgttttgaaagtttctgatagagcgttagcaaggtgatccagaaaattcttcaggttcatcacatacggtgtatatcacgtatttctgcaccgggattttatattccttcatcctgtctgcaagctcacgcaagtactcgtgaatgttgttgagaacgatttcctgatcttcaccggacaagatttcgttgagtagctttgatgatacctcctttgagagggcacagtattcacgacgcttcatgtcaagacccttgacctcaagtttctccacgtacttgccatccacctcggtaaggttgatagcagcgtacttcttcttggcatgtagtagaagccgacggaagatattgtcgatatcgatttctagaagtcggtaacgttcgttgaccgatttcttgaactcttcgccaaccttgagggcgtcactcatgttgtccatattcgtattgatcatgaccgaatcggtgtcaccataaatgactcgcaattgctggctttcggccaattccttggtgtttctcagaatttcacgtcccttaaaagtggtgagcattgccaaaggacgagcgtaaaatcgactctgtgtgtatcccaagcatccgtacatggaattggcagtcagcttcaatgccaattgttttgtgtcccatatggccagttgttcgggtgtggcacgcttgtctttcatcaacttcttcacttcgcgtcgacgactaaccaacgtcgcgatcaaccgaggtagaacgccttgttcttggtcaggggaggggacatctggcactttttcttcattctcattctcggcctagttgcaaatgttagaaatagaggaaacaagactaggggttggttgggttaatttaccgtagctgttcggtccactgttgtgaagcagatgttgtattcctgaataatactgggatacagactgttgaagtccataacaaggacgaagcggtcgtaaagacctttttcgggctcgaaaacaagaccgcccttgaatttgtccttctttttcttgtcgaccacctcatcatcgtcgccatcttgtattttctcctctgccttctgaagacgagacgagtacttgtccggacagatgtatttgttgcgatgaaactcatgtaacaaaatatactcgttgcgctcggcacgcgtaccgctaagtgtgcgtgcccacgaattacccgcggtattggttaggaccttcgtaagtggcagcatctgaagacgtaaaaccaatgccgcaatgaagtatgtatctgtatcacaatgattgacaaaattcatgagaccttctttggtggtcgcccaggttttcagtgccgcttcggcatccagttcctggcgtacattgccttgaccgaggtagagttggcacatctcagtcaaactccatgattgacatttcatcataagagactagtagctgtcagcattgtgatgtacccactttgaggagaaaattaccttgcccatgtcattggcaacatcacacatcaatcttccagcaatcaactgtctttcggcgaagaagttgccacccttgttgaaattcttaggccaatctccacgcctgagtcggccaatacgatgccatccaggcgtcttcttttcccgcatccggctgagtagaatgcccaggtcgacatcctgcaactgatggcccatgatcacatcggggtccatcttctcgaacatagccaggaatttactgagcaagaactgttcgcttttttcaagaatgacagttccttgctgatttcgtgcttcggcttcaaaatgcattgggtatgatccaccagcagggcgcatgacggtgaatgtcttgcacggaagcttctctggtggagtggtatcagtcagagaaacgtcttcatacacccgggcacttgctattagaatctcctgcttgttctccttgacattgagctgggtacggaaagaaagactcattaaggtcaagggcggggcatccaggttctcggaatctgggacgaggctgatgagagctggtttggtggcctggcattcgaacttgcaccaggatgcattggttactgcagcaaagtctgcctgatcgatcttgagccagcaagggcccattatatttttccagagaacaaactgttcaaacagggaggtattggtaccgaaaacgtttgagaaagtctctcccttagtttccattggcagtgcagccttatcgtaggggtagagtaatttgagatactccgcttcctttgggaccccgggcatttcaaatgcgtacttccgttcgcacggtttcatcttgtgcatgccgactttcagtcttgacatcatctcgtcgacctctgagtaaacatcttgcatgtcaacctcctcttccgtcgctcgtccttgcttgtatcgatattcacgcggcaggaaatagagctttcgcaagatattgtcaatcttaacgaatgcactggtgtatgatccattctgcttgttcttcacttttccgaacagacacaagctgccgttgacttccgtgtagtccagccagaatatgcgcagactgccgtcctcttcgacaacatcctgggcgcgcagctttccaaatgatcgcatttccggagctggactactgaggacgttcaatttgctcctcacgtcattccaagaagcatccattacttctgccattgacttgactggggacgagcttgctggtgtaggagcaatttcacgcttgatcttcgggggcggtcgactgccggtcatgttgatagtcttcgttttaaggctagagtctccagtgacttctgcgacgtccatgaggtcaacatcatcgtcttctggctcttcggccttgaccggtacagtgttcctccgttccaccgctttaataatcggagacgagggcagtatatcgctcatgggaacgtcatcatcgtctgccatcggtagagggccgtcatcgagatcgtcagagtggagtgccgggtccttcattggcgagcttggaatgtgattttcgtcttttgcgtgaagcttctcgcggcgacgcttctcagacagaggcggggagagaacgcggactttgcgtcgggcttctgatttgacaatgtttcgtgtcggggcgtgattcgatacgacattggtgtcgacctctccgagaagatcggccatgaatgcatcgtcctcggcagtagcagcgggcttgtaaaacacttgtcaaaataaggtggttggattccacgagcaaaaagcactcaccttgggtttgggaacagaagccgcagcctgtcctttgttgaagtacttggatatgccattgttaattttctcctttcgctgttgttcctcttctctctttcgtttggcagccttgccccgtgtaggtagttcgtcgctctcgtcactgtcatattctgctgtctgttcgttccatacctcgcggccatcgtccgcgtaacccgcaccgttatcatcgacgacaaaatcatcctgatcaagacgatttcggatgacctttttgtagccatcatcatcaacctcgtcgtagatatcgccctggtcctcaacctcgtatgtggaaagtcgtttctttcctgaggcacggagggccctcagctcggccaacctttcgcgggctgtaggcattatggtttcttcaggaatcactacccattaaactgagttgggtgcctaaataaaagtagattgaattgacgattgttgcggggaaagggaggatgaaaggagtgccgcgccattcatccaggcacgcgaacaccacgcgtcaggtcgcgtttgccctagttaaaggtaaagtttgccggtgagattatgtcagcaccgtaagtgtttctgcctcaggtgatcctagtaattacatcagccattgaatgccttaggcgaacatacccgccctgaggcgatcatatcgtgccctaatatctaagtttaatgattcgcgcaagataggcttcaacatcagaggtggccaggtcatctttccctctttagatttatggtatcaaatttattggaatatatgatgcaaacatacattttaattaccacatgtcattagactataattggctcggatagaggcatatggctgtctatgtgttttgaaacccagccaaaaagcccaaagagaggaaaatatttgcttgtgaagggcgtagttactctatgaatgaataagagactactatgataaaggaataagccaccagtagtataagcctgatatccagggccatcaatatacatacatagtaggtacaatgattaccctactcataatttgatacagctgattcttataacaagtgacctcttgattggcattactaattgacaacagatagttaggtctgaggtacactcagatggtcaatcgatctctcaatgtgatgcatgcaatagtcactaagaccataatattcacagaccgcgatattggcaatctacacctcggcgtccttctgttgtaatcatgatttctcaggtgatgagctacctgcgttttctgcatggccgtactataggtcgctatgttcgtaagtcgctatggccgtattataagtcgctatggccgtaagtcgctatggccgtattataagtcgctatggccgtattataagtcgctatggccgtattataagtcgccatggccgtaagtcgctatggccgtactataagtcgccccggcgatgtaataatttatatttaaaccacagttcggtccctttactactttctctttcatgttttttcctctcctacttctctggctatctttctgtcgctgtgagactatacttctttgatcttcttaccctcgagaggtgttccaggttcagagtccgctgtcatttttctcagctctcacagcatgccggtgagttcaaattgttctctttccatctagtgatttctttgtttctagttcactagtcgctgtggtgtttcatccaccccgtcgcatcatggctcgtttaccagtcacgtccacgaactatgggttgcccagcagaacacatcaagttacaagacacgacttgttagaaaggactttggtaagtcttctaccttgcagtatgccggtgaaaaattctaactggtctcctttgcttcggtaccatgcatgtcgcttccatctatcactccaacgagccatggcttggccatcagaacatagcaccctttatgagacagggagcacatggaatagattttgatgagcattctactcacttgccacgattaaattaatttgactaattctcaatgcagggcatccctcaataccgtcagcaaaattcccacacacgtggcagctgggtatgtacgatggacagacagaattgagctgtttatttgatgtaatgtgacaacttccatttctcgtccaatggcattggcatcccgcaaaatgatgacagttactcactacacagagctccctagtctttactctaagtatggactttgaggacaagaggtgacaagaacagtctgatgcgagactaactatctatctaggtcgcttttcgtatcgctttttgtacttcttactcctcactctttataggaactttatgatagcgactcggctattcaaactgcggacgcgttgatggatttgccaattggatcaaggtatgtcctaacccgtttttgtctaatgatagtcgcaaaatgatgagaattcttactacacaatatggagctccctagtctacggactttgaggacaggaatgaatagaactctgatgcgagactaattaccccaatcaactacctaggtcagatttcgcacttcttgctcctcactctttgtgggagccactcgactcgagctacggggccaatgtgcccgaaagcgaactctcgatgaaactgaaaggatcaagccgatctgggtcaagataaaacagtacttggtttgatccaactgtttgtactatggaataatgttcgaatatttttgctaacactctcaagaacctaggtgtgtattccattttcacttctcgatatgaacctcctctcattacacaagcaaatgaatattgggctcgatgaacccgaaagcgcatgttatgatgagaatatactatggaagtgaccgtgcctcgccaaatgactttccaactggcttacatggtcattcaaggggtcactggacacggtgaaaaggaagataaggactctgataccatgcgagacacaggatattgctttcctggctgatattatggcccttcttgatctgttttgatattggaaacttctgctaataatcttgagatcttctaggtttccatactgcttccaaccccacaagcacaattgatactcggtgccacagaaaggccatttcatgatggttaaaaaatattacactttgagggaacgtggaccctcggagccaatggactcagtgataagtttgaagcacatctgatacaaggcgaaaataagtatatcatttccctgactgatcttgcacatcttctgcacttgctacgttttcttttcttttcttttttttttcttttgacactcgtgatatctagattatcccataattactttcgggtgagactcaatatggctccaatggattcctagcagaatgagcatctgaagtatcggtcaatgaggactactacccaatttgaagatgacgatgaccccgagttttcgagagatcaacggacgcaatcaaaggttgagattgaacactggtatgagttgaataaacaaaaacacttgactttcatgactgacccgtctgtcgttgtgatccaattccacattgggtcttctagttcacactttcagatcaaaggatttcgtctctcttattccttttccatgtaaactgtatggcttgatacaagtaccccgaggattcgaagactagtatctaggggatttgaacatccacggctttcaatggtccgaggggctacagcaacctgcctgagacgcgacaaatcaaaggcttgattcggactaagccgctggaaattctgttttccttgttcgatcccaactccgtgtgttggtatgcagctctctggctggtatgggacgaagatcgacattttcagagtatggcacaatccttctcacgttgatattggaatctctcgactaattgttccgatgtaccactttagattgccaatcacccattcaggtatgacctgacacattcttttttcatctaatggcaattgaaactcgcacatgatgacgatttatcactacacagagcaccttagtctatactctcactatggactttgaggacaagaaatgagaagaacagtctgatgcgagactaattgctcctcactctttataggaactttgtgggagcgactcgacatagtcgtacacacggcggatacattgatggattgctggttctggatcaaggtatgacctgacccttttttctccaacgatgatcgcaaaatgatgacaatttctcactacactatgagctccctagtctacagactttgaggacaagaggtgataagaacagtctgatgcgagactaactacctatctaggtcgctttttgtacttcttactcctcactctttataggaactttatgatagcgactcggctattcaaactgcggacgcgttgatggatttgccaattggatcaaggtatgacctgatataccccgtttttgtctaatgataatcgcaagatgatgagaattcttactacacaatatggagctccctagtctacggactttgaggacagcaatgaaaagaactctgatgcgagactaattgctcctcactctttataggaactttgtgggagtaacccactacggacacattgatggattgctgattttggatcaaggtatgacccgatatgtccctttctttttgtctaatgataaccgcaaaatgatgacaatctctcactacactatgagctccctagtctacggactttgaggacaagaggtgattagaacagtctgatgcgagactaattacccatctaggtcgatctgcacacttcataggaactttctacagacacattgatggattgctgattttggatcaaggtaagtcctaacccttttttgtctaatgataatcgcaaaatgatgagaattcttactacacaaattagagcttcctagtctatacggactttgaggacaggaatgaatagaactctgatgcgagactaactacctatctaggtcggtttacacacttcctcctcctcactctttataggaacttagtcgtgcatactgcgcacacattggtggattggcaattttggatcaaggtaagtcctaccccttttttgtctaatgataatcgcaaaatgatgagaattattactacacaaattagagcttcctagtctatacggactttgaggacagaaatggtaagaactctgatgcgagacttattaccacattcaattacctaggtcgatttgcgcacttcttgctcctcactctttgtgggagcgactcgacatagtcgtgtagtgactatggatgagtgcaaagctcgcgaatgatgaccttttatgtcttctttatttggtgacttgctttggcaagacaacaagtagagaaggcatacctgacgcgaggacgaatatcaagagaggtaagttttccccctgtcacattttcattaacaattggatactttaacgtttttcgagcagtttgaaagctcgcgaatgatgaccttctatgtcttctttatttgatgacttgaatgcatacctgacgcgaggacgatcaagagaggtgaggtttttatccccctatgcttcatggcaacattttcgatcagtatgttttgacaatatcgagacataaggagagaggtaagtttcctattcccctgttcgttgaccatgatcttttaaaggaatatccctactctcatcatcggatggcaccacacttatacttcagtggtggtcgaggcaaggcaagtcttccattccctcatttttatggacgttaacagttagttttgagagaacctttccaagtggatcaaccttcaaactcccaaatgatgaccgtttatcccttcatttcgaagattggcatgagccccaatcaaaacgaaaaaaacttctgatgggagctacacaaggtttccactacagaggattgatctctcgaaagatatgtcgacaacttccctatatcttggctgcagtgcagttctatatctcaaatgcgaagacgcctgtgcttcaagcgcgattgaaatgaacaaaggcaagttttcccttcccctgcatttctgtaaatgctgatttcgggctttaaatgaacacacgtctagaggatgaatctatcaagtgagtgagcctcgaaactcatatatgatgactgctgaattgttcaattgagtcgctatgtcgaatgcatagataggtattggcattaacgagaagccagatctcgacatagggtttactgagaaggtacgttgggaatccccttatgctggtcgaacctgatgacattttcaatagtatcccaagtggctgagccttggaactctcaaatgatgactttaacgttcttattccgtccaagtgactgcattggcaggcatcagtgaaagacaaaaaaaaatctgatgagagttcaatacaaggtcgagtcgcatagcactttaagtgggtaatcccttgacctacagatgatgagcttacaccgatcatatgccttcctacagaatattaccccaacggggaaagagaagaatttctgattaagagaaagcgagagttggccaggagaagacattgcaattcgcctactttggtgatgactgagtcttgtatactccggatgaaaatgtaagctcacattgatgcgtatcaacgatgacgcaagacaatatctgactgatatctagtcccgggctgctttcttgatactggcgaagagttattggagaggttgaggagcatttcaagaggagttgttgcgggaaatgtcgaaagagagccgcggcactggctgtgagtgccagcaattcttttttcatgtatgcatggattcatgttgctcacaccatctggctacgacatggaattgaaataatgtccaattgaactgaggtttggcggtaaatccgagtgacagatagccaatgtccggggtaaacttgttgtaagtatgtaaagccatgaattctatgtggtccagtatgggagagcgaggtgcgaggacctcggtggtttaccttcaaaagcagatacttgccaagttggcgtatggagaacataaatctgggaaaaataagaccaatgttgttagaacactatagccaaaagattccaaaacaaaggcttgaacaagataaaacccagtatcattgagtagattttcctggctatgctaggtatttttttccagccgtgcaggacagcgccagtgaaaaacatatcaacaaggcaccggaacaacaaccagaggttattttcccaaattcctctagcccggtcctcagatctcttgcaagagcggttaaaccgaacaaaaaccgctcaaacatccccgaatcctcccaagtccccagtccaccaagaagtcatggaaacaagtcgtgatggaaaaaacatatgaagacagacatattccatttccccgttgccgtaaacttttctttcccttttcgccgcgtaacaagtgaggaagaaaaatttaacggtaggacttctggtaacgggagcgggcaccgcgaccaccgaacttcttgggctcggcgcgacggttatcggcaaccaggagtgtgcggtcgtactgagcaagagcctgcttcagctggttcttggagtgctcatcgacgtacttctggtagtaggcgacaatggacttggcgatagcctgacggatggcgtagacctgcgaggtgtgaccaccaccggtaacgcggacacggatgtcgacaccggcgaacttgtcaacgccgacgatgaggaggggctcgtagacctaaaatttcgagggtgaattgtcagaaaccgagttcgtagacgttttcccattgccattgtcgcttgcgattcgtgcgaatcttttcgtttgtggcgcacgggaggtggttgagcgaatgtattgtgcgtaccttgaaacggaggatctcgggctggaccagggagaggggctggccgttaaccttgacgaggcccttgccttgctgtaaaaagtctcagcgtgttgtccaattcaatgtgtataagacccccatgatcgcgcaacatgttgtttcgtatatcattccaaaattcaaccccagttcttcgtttcgtgcacgattcctttccgacaatttcctttccagacatttcgaaacaacgtattgggaccgagagagtagaggcgttcatcataccttgcagtgggcgacagcggtggctattgaaaacgaaatatgtcagcgcacgggttcattcactctggtctccggtcgaaaaaaagagagcttacccgtcttcttcttgccgaagcattgcacactcgggacggaagccatggtggattgtcgtgggggagggagtgtgttgtcgagggagatggaaaaagagtcacttgaattcccatacacagtgatttgcccttccgtgcgggtttcgcttagtgtgcgacgctaattctactttgggactagcgtggcacgagacttagggcttggtcacatgaccggagaacttcaatcggggcgggttagaggctacaagcaatacagggaacgctgagatcatcattatctctgacatttaagcgctgagtctgttttggttgctgggatcttcaattgaacgactccgcctttcattaattgtctaattgtccatcgccccggcatatacaccaccctccgccgcgtcaacaagatgtcgcaactcgtcggcaaggtaaatagtttcaatgcggagccttccgggccaaccgcgcatgccctgaactcaagcaagcaactcgattctaaccagtaacgcatcagactcgtctcgcctactcgcgtacatggcactatgtcgacgccggcaccgatgaacgatccctcggccgcctcgcctcgtcgatcgccctcgtcttgatgggcaagaacaagccgatcttcgacccttcaacagactgtggtgactatgtggtggttgtgggatgtcatgatctcaagacaacaggaaagaaacgattccagaagaagtactacacgcacacgacacggcccggtagcttgaagagcatgacgatggatcagatgtttgccaaatggggtggtggtgaagtcctgcgccgcgctgtcaggggcatgctgcctaagaaccgactgaaggatgcccgccttgctcgattgaagagtaagttctagatttttatgctcctgctccttggatgggttgcttgattggtggagatacgcacgggttcatcttcgaagaacaacggggacactatccatttagccgatctacttcttcacgttttgacccagtctaacccaatgtcgtgcagctttcgaaggtgtggcccacccctacaaggaaaatattgtcaagttcggcaaccaatcgatgatcggaaatctgcccgaagtgcaggaagcattcaaagaagccgccgaaaagccaagcgcataaagcacccttttttatctctccttgtttcgttattttagagcgccgacctaaaccgggtccgtgtctacctgtattctattctcctgcgatgttatgatccaaccgcacaagcgcatgggtgtggagtccatttgggatattgcttttgattatctactctgttggcctcggacttttcaactttcgagcctgcggttcttttgaaatgtacttatagcacatacaatcacaataccacgtactatacaatgcttttttaccttatcttttgcgatgttgtgacggattggattcgagatataaagagtctgatcccagaagtataggaaatggatatatgtacaaaatagaaaagaaacccaagctagcgcccatgtcggagctcgccgacaatcctttagaaagcatttacagcttagcctttgggccagcgcggccaacggtgcacttgataagaccgttggggttggattggggggcgtacaccgaggcatccttgccggtgttcttgatacccttgtgccagctgagatctacaagcgcagaggttagcccaaatccaagattcacaggggagggggtcaaacataccaacttcgaagaagtggatattaggcaacgcatagtcaacagtctccaagagaggctcaacagcaagaatctgctctcccatcttgtacatagtcgcctggacggaggcactgttatcctcagcaaaggtcttgagggtaatagcgcgggccgcctcccaagcagcattgaacttctcaacgtgtgtcttgacatcggcaagaccagcgaagcggcgccactgccagtccgcggcgacatcagtgctgaggagacggtcccaggtctccttgagggtcgtgtattcgtcgcggacgaaaccccagaactgggaaccggtgctcttcagcacggtcaggcctctgatagagcttttgatgtcgatgccctttccttcgatgacgtcgacttgcacgttgcgcgtctcggagccaggcttgataaacgagtgcgggtgtggcttgccgtcgatctccatgcgtacccagcggtgggtaacgatgttaacgtgcgccgcgtggatgtggctgtacttctcgatgaagtgtgtgcccaggatcgagccgaacagctccggtggggatacggggttctgcttggctgtgatgaagacggtgttcttgattgagtcggttgcgacaacgacgctgttatcggccttggtgtaactgtggggaccttcaggttagcttcaactttttttctctcgataaaagatgtcgattgacatacgaggtctcgatgtcgccctccagcaggacgcatacggtcatctccacgaccgtctggatgccggtcttctcatcgcggtccaccttgcacacgcggacattgtccttgccgtagcgagcagctgccaatacgctcatcttgaattttgggagggtaacttgggaatatggaagagaagaagaagtagagtgtgaaagttaaatgattgtattacccagcagacctgatcagtatttatctggaatgcatattggctgatccagagagcatcgggcacctccgatggccgcgatggccgcgagtggccgcgatctcctccaaatcccgatcttatcagttggcgattggacagttcattttcttcctacctttatgtagctatggcctgatgcttctatgccattctcacctatcaccatcatatgttgtaccgaaggagaagaaaaagacaatttcctttcccccagactttcgggccacgagccgagtgcagtgacagtggagatctcacattcccaatcccgaacttccgaccactctgcggacttcaactgcaaatgcctagattattttcaaatccctaacatctctaacatccctaacgttctgtataccatccggagacctccactgcggaccggcgagctgcgagccgtgaaagacgaagttccggcgataaacactcagcgctgacatgatattcttcctctgttgacaattgccataataggcatgcgcagtgacctcactgtcggtggtacagtgcggggagaaatatggcacagtctgtacgttgactcgccttgatgacgagatatcgtggcatttttgttctcttttgttcatttaagtactttgtacggaatacaccgaaggtatttcatggttaatgctgtcctacttcaatcgtccagggtagcttgtatatataacctccgtggtgtataccaggttgctcatgcaatttctatcagaggcaatatatatcttcagaggtagtatatatccccccagacaacctacacgtacaaacaccattagagcgcttatttccgatgaacagccggagttaacactgaagtctctccaagactcggcatgaaagagcctcaatacccacagagcacaaaagagtacctatacatacaccgcataggggaaatgcgtggcctacgcctcctgtcacagcatgtgcaagtgtcaagcacactgacctatctagcggtcaacgatgattgccatgagggatttgatttgcttctatatgagtgacaatattacccgaggtcatcatgtgctcaaccttgctgccaacgctccgaccaaagccaagtttcatctctagacagggaataatcaagatatttaactatgcagtctctctcgtacatcctagaccccaatatatgtccaatcctcaacacccatgcccagaacgacagcatgtaggatatgtatcagatccagatagcagattggattctttttttggaataaagaattcacagcgtgcattgaatggcacgcctggtccccagcttagattgcaattgtcgaatcggagggtgtggtgggtgccaatgctggtggtatcgtctgcaacgtcgatctgacgaatctcgcatgcagtgcacacttctaagccatatcaatcagcataatatcccgcgattgggtaaattgtcgagtaaaaagcgggcgaggtctatcaggttctcggtcaaggctgggctgattctttgttcaacagggagtcgtcacttgcctattacgtctggcacttatcgactaatttctggttttgttgattctcagctttccctgaacttctaattagtcacacctcatattagtccgttctcatattagtgattcggattcgcgagggacttctttgtttccatctgcaggcaaccgctcgcgtttcggataatcatgactatacgcgatctaataaatctcaagagagagccagggaaaaatcgtgctccctggctgttgaaggttcgttcctcaacgggttttattatcggtgcagtctggatgtccaccttcacggtatgtgagagtctggtcctctattcttctaagtccccaactgagactcaattgaaataaggaattcctcctgtatgccatggtaagcaagatcttacttatgatgtgagttgaacccagaaccaacgaacgacagatagtccccgtgatgccaacagcactcgtcacccgagccggagtcggattcgagcaccgtatgtctaacagcttccctggcaaactattgcatactaacctttgaccaggagaatactgggtcagcgtccttctcatgtgcgaagcaggcatgtctctattcatgtgtcccatattcggctacctggtcgaccgcgcacgcacacgtcgactacccttcatcagtgccctggtcatactaaccggctgtatgctgatcttacaactggcgcattccatcgctgcgtttgtcatagctcgtctactccagggcattgcaggtgctctagtagtggtagcggcattcgctctcatcggcgacgccgtgtcccaggagcatctcggtcagacaatagggtatcttggctccgcgattgcctcggggttcctactgggtccgttcctcggaggcgttgtgtacaattcgggtgggtacaacgccgtgttctggtttgcgtatcctattcttgcgcttgacatggttatgcggctggttttgatcgagaagaaggtggctgctcagtggactggagaatcaaacgggaacctggagtcggatctggagacggcgcagcgtattccctctgtcggttcgcgcgaaccacaggtcatccaaagaaggaaagggctcgttatcttccggatgctcagacagcgccgagtgttgatctcttcgtgggcgctcctcgcgcagggaatcttgctttctgcttttgatgcggtatgtactagactccaccttttcaacatgaatggttggctaatcacatccagactctctccatcttcgtcgaaacgacatttggctggaactccctcggcatgggactaatcttcctcccaatggccgtcccggccttcttcgagccgctgttcggcggcttcacggacaagttcggtgcccgctttgtagccttcggctgtttcgttcttctctcgcccaccctcatctgtctccggtttgtccaggcaaaatcgaatgaacaaatcgctctgctggtatccttgctcttccttgtcggggtcttcatccacgcctgtgcaccagctatgtacgttgagacgcagcgtgcactcacggcaatggaactcaagagcccaggcatactcggatccaagggtgccgtggcgcagggattcggattgcagagtatgtgccagtttgctggggtgttcttcggaccactttggggtgggtttgtcgagtatcgtttcggatggggggcgatgacgggcacattgggagttttcgtagcgctcactgcgcttccgatgctgtggttaggagaaaccgaggaggagagggctttaatgagctgaatgagggttacgcagttaggcagcacttttttcaaattattttttccaacgcaggtatcagttctgcctacatgtaagcaagtaggtcacttcggaactatacgttgcacctggattacctaggtatagtagcggctttacaaggtgcttatctttgatatatttgtatgcctagaatctctggaatcttttgtatttcatagcctattatagctgcaatatatgtctgggtttgtgtctctcgatctatcaaggtatcctttagaggccgagaagtgaggagttgcgcgaggtgcggcatttgattctatacaaattttatagactagacaccaggagaaaccagataatgtatttacacagtgttacctttatttagatccaggaacatatgataaattcaattcctctactccgtacagcagcaaaccgaagttcaaaaacggttagatccatataacaagccccaccacggtgttaagcttatcgcctggactatcccaatgcggcagctcagtcgttctcttccttttaacttgtttaggctcatcgtcgacattcctctcatctcctcatattgactccattgggatcttcccttcagcataaataacccccaattcgccccgaccattctccccatggcacttcttcactcgatccaacgactaagacaagcatctaccactgtcagtacatcagtctgtcgcattctgtaccacacacatgtgatctaacccatccagatctccttagctcgacctcacctaccggtcatataccaatacaaacccccattccaaccaacccacccaacagcaaccatgccgcccaccaacaaaatctggcacatccagcaccgcgccctctcactccaagcagacagagcaaagcaatacatccgcccagcagaaacaagcacccacctagcaaccctcctaagcttcccctcccgccgctcgaccctcccagagctacacgccaaaacaagcaacgagataatctccctcgcgaccacaatcgcagccttcgaacccgtgcacctctacgcccgatctgaagacatcccacaagcccaaggcctcctcgacaaacaaccccagcaccggtccaacataaccctcatcgcagcgccaacaaaccactgctggatccgcgacacaggccccgtctacgtccacagcgccgatccagcagacaaaacccgctacgcaatcgacttccgcttctgcgaatggggccacaaaaccacagaatacatctacggcgccaacgcctcgcccgcagcagcagaggcgctcgaaacatccccgcaatacgccgagtggccggtaatggacgcgcaagccatgagcgagaacacggcgttcgcgggcgtcgtgctggatctcgagaatgcgggcgcggacacggtggcggatgttgtcgtgcgggtggagacggatatccggctcgagggcgggggtattgaggtcgacggcgaggggacgttcatggcgacggagagtagtattattggcgacgcacgcaatcctggactcgggaaggcggagatcgaggcggagcttcgtcggttgctaggtgtcagtacgttcatttggttccccgggagggtggggctcgatgttacggatttgcatgttgatgctgaggcgaggtttgtgagacctggggttgtggttgtttgtcgtccgcatgagaaggcggagaaggtgcgttgggaggtctattcggagattcgggcggtgttggagagatctactgatgcgcgtggtcggcgctttgaggttcatgatgttgttgagccggatccgagcttcgttcaggggggtcttgctggggaggaggaggcgtcggcggcttcgtatgtgaacttttactttgttaatggtggactggttatcccggcgtttggggatcctgaggctgatgagaaggcctttgagttgatgaagagcctggttcctgggagggaggttcgtcaggttgaggtcaatgccttgcctaggactggaggtgtgctgcattgtgttacacagcaggtggtgtgagggcactagctagctgcctaggtaaatatacagaatctgatttttagaaacggtcaaggaagaatattcaaagatgtgatattgatagtgatgttgatattgaaaaaagaatgtttttgaccatagacttgctagtgtggaaaataaacagaacggaaaaagagaacggagagagagaagtcgaaacgagagactaaacaaaccccattcccacgcagatcataattcatgtagaatagtgtaagatgtatgtcttttttgggcttcttttgtaccagcaaaatggccagtaagaaaccaagatccccaactggaacctgatatcatcctccgatccagattccagacctagaccgatatcagagaacgcagggaagaaacgaagaaggaaaagaaagaggagaacaccgtcccaggacgcctgataatgccgcgccacgaagcaaagagaacgcggacgaaaagaggccaaaaaaaagaaagacgcatagaatccgtgatggagcagtgtcagatattcacatccgatcgagcatccgattgcagtcccaggatgatagccagtcaacccagaacagaccgaaaaccaaaccaaaaaccccataagaccctctcgggaccccgttccccccacatcacgttgatcttatatctcaaagactcaactgatcgatactccccacccgcccactcccgccaagccgccccccacccttcgtaaccatcccgagtcgatagaagcgctcttcgccagcgggcgtcctcccaccaatataccacttctccggaccgatggcatcgcggaacccgcccgagccactggaagaatcactcccgcggcgctggcggtctgctgagccacgattaatcgggatgggagtcgaggtggatgatggtggtgtggaggggagagatgattggtcgtggtgatagtggtgtgaaggggatggactcgggccttggacttggccggctggtgctgtagtcgaggcggatgaggatgtgtgggtgtggtggtgattatggtggttgtgagtgtgattatggtgggctgcggcagaagcagatgatggtgctgatgagccttgggctgagttggctgcttttgttgcgatggcgcgggcactctgggagatctgggcggaggaaagggttgaggttgtggcgccgacttgctgggcaggcttataggttgactgggcgcggaaggcagccaggaagttggcgaggaatggacggttgttggacatgattagacagggagaggattcacctgttgttgattttgattatggaatgtgaagatgtagaataggagaagtctgagagtgcccgatctcaagttcccgatcccacgggcgctccaatcacgggcggcggattatggttatgacgttacataggaagatcccggagacgttatatccatttctccgctactccgctacatcttgtatatacaacgtatcaattgaagtatagatttgaagtaccttgtgaacgtcttctccaaggtaccccggcttccccagatactggcacgtcaaatggatcataagtctatttctagctgcttttctagtaaatcctgagaataaaacaaacaccttaaatcacacctcaaggaattcccaaagcacacatatgtcctgccatgccgactttacatgagaaaagaggccatgcgatgcagaagaaaaaacgagaaaggaaaagataaaagcacatggcaaaaaatggactgcaagaatgaaagaaacatggcaattcgacaacaaccatcccataaaaaagagaatgtaagaaaaaaaagcttttctcctttctgatgtcgagcactcgcgcaaaagatgaacacatgcccatgtctatgttgtggacgccgaacaaaccaccataccatctgcccctcacatcgggggttcaagataaaagataaccagactcgcaaaccacttaagaatgcacacccacaccggatgggatcagaatagaaaagaaaagaagatagatcgacaaacgtggaacgggagacgctagatcacgaaacaccgcaagctgaaagccgcaagcgaacggatcaaaggactaccgtaaacagatttgttgaaacatcgtgaccagtggatttgcaccagcggagaagccagggacgaagccctagaaacaatagaagagagggtggagagcaatagtcctacccacggcgtgaagaagagaggaaccttttgtggtattttacttagtcaaaacgctttttcaatcttatgcctaggcatcatcttgctttccgaattcaccgtctattgtctcgcgggctgtacattacctgcatattttttgttagaaaccgatatcataatcaacggcataaaaaaaaaaaactaaccgtctccgctcagcgtagtcgaggcaaggtacagtccgttcataccgctctcaggaccggtcgaggcagggtagtacttgcggtcgtggtcgacgggagcgtggatcggctcctggcccgcggccatggagtggggaaaaccggggttaatgtaaccgtcggaggaaccgtgctgaaacatcgaattccagtcaacacccgggtgatgtgagtggggaccgggcatgaccggcttgtggtcatggtaaaccgggggctttacctgttcaaggggacgatcacccgtcagctgctggccatgagcatcgacaccaggctgcatgagatacgggttctgcttaggtccagccatccacgaggctctcgcgtgcgcctggccagcggagaacgcgtcgtcaccgggaccacggttcatgccgttgacagactgcatcgtgaaaccgagcggctgctgctccgcgtagctaggacgacctgtagccattccattgccattcacggccccatcgtattgcgtacccataacgccattggagtgggggacgggattactgacttcatcctggagcggcttagggggattggccgcggcagccgcagctgcttgctgctgagaccgcttcagatgggcctgcgggtgggacaagtgggtcgctccggtcgggttaccccgtcggatcgagcatttttggaagtgacgcttcaagatatcactgcgggagaaagtgtccttacataggacacacatgtaagggcgatcaccagtgtctatacaaatcagacagtcagcacatctcgtcctaagggaatttttctgttttttcttctttttttttttttcttcgctctaccgaaaacttacgtctcaacaaatggcgcttgaggtgcttagcgtggaggtaagtcttgttacagtgcggacaggggaatttgccatccgcgtcctttgcgggaatcgtcgtgctcttagctgtaccattgacaccgttcgaaaccggagtcgcgcggcccgggacactcggcaaaatgccacggcggccctgagagcccacgacctgcgtgcgtggcggttccttggcgtagggggagccgttcgcgccattcacatcaggagtcataccccaacccttgccgtcggagtaactaaaggcaccggacggaagaccattgaaatccgggcggcgatcgcgggggggtgccggagcaatcggctgagggtagctctgagcggaggatgcgggcggaaggacactcggaggtggggggtactgctgatgcgcctgtgtttgagggttaggaagattcaacagagacgatggcggaaggctaccgacagtcgtgtgcggcatcatcggggcctgggaagccccgtagacatcgtgagttgacggggggtaccgcgacaagtccggacggtacggctgccccatgtagtggtgaggcgcgggagactgagggtggtgcggctgcaatggaggcagagtatgcggctgcgaaaccggatactgcggctgcatcgagtattgtgggatatgcatgctcgagatgggagtcgaggacatgggcgtggagccgggaggcagactggtggatggaggacgggaagggtgagatctgggatccattgtggacagaggagggagatcgtgtagaaaagaaagaaaggatgttggttcacggtaactcaatcatcaaccctgcactctggatgattttttttttctttgaaggaaaggaagctccttgtttgaaaattttcctgcgaacaagaaagacagaggcaaacggtcacagggtctcacgggattcacgggattcagactgagttgactccacacgaagagagaaaggaaggaagagatgcttaattgaagaagattccccacggtcacccactaggaagaaaaaaataggatggtgatttatccgcacgttgtgacaaccaccgtcgatggttctgtatccaccgaagaagcgggcgtacaagtgggtctcttctctcgcagcaaaaacaactagtccgagatctgcttcgcgtcaaggtaatccttgagatcgaggaattgagccaatagaatggaagtatcttaaagaatggaatagaggaattgaagggttcgagaacagggaattgagtgattgaagatttgaggattgagaattgggaattgggaattgggggaaattggggaggaaaagagaaaatgggggataagtttcttggtaaagacgaaaaggaaaattctaaggaagaccggatcgaaaaaaaggaaaaaggaaaaaaaagaccgaaaagacgagaaaagacgaaaaaagacgatcgttcctcggggaggcaagaggcgacagacgaaaaagaaaatgcgaaaaaggaaatgacacgtaattaccgtatttttgcacttgccagttccaaatttacacggccgtcttccgaagtatggccgatagcggtagggacgtattaggattgttgggatagatagtttggatattgaatattctattattcggattggattgagaataacacgaatagcgaataaccagccgaatcactttacacatagacacatagacacgtacttcagcacatcgccatctctcactggatctgcccacgtccgggtacgatgacgcacgtaaggtatatcccatctaatcacccgtggacggatgataataagtcccgaaaccattgaactatatcatatgcaatccgatgattccagagatagtagatcgatatatcgtgaactttgtatgtatgttgtagaacaaaacacaaggttcactgcgatatgctacagcccaagtcgggatccctccgatcgcggcgattgccagactaccattgggcagaccgctaacactgccaactattaacacatagatatgccgttgtgtatgattatctgatgttggagtagatcttattatatttggagatggagccatctccccgaatgtggattgtggttgaccctggctcttctttgttttgggctccgcagtggctgacagccccgcaagtgacatctgatatgtattcaaccattactctgcggactacggagtactctatgtctatatatctttgagctactccgcagggaatataatgtaggtagatgaggtctcagactgtataattccacccttcactaatctcttcaaacacgttattcaggggagccagaggaagagctccaatgagctcgagctcgacctcgtcatacatcctctgttgtactggatttggctcctgcatgcagtctagatgtacatggccatggcacatctggcacatctccagaagaaggtgcatgcgttctcgggctcttcctggaagactggcgaccggggcttctgtaacggccatgcagtgttgccgtagagtacttaagtggatgcgctgtagccgctctttgcactgctttccgcacttagcttgggactcgaaaaacatgacgcgaattgcacttcgtatattgtacataaaagaaaacaagataaagctatcaatggcacaagtctaactgggagactattgctgcctagacaatatagagaaaaaagaggagtccgaagtagagtgtttttgctcagttcagccacacaggaatgctctagacgaatttggcattcagggggttccccttattggacgtggctacttccgtgggctgacataggtgggctgcggttcgcgtacttttgcaatgcagatttcttattctattattaagccgatatctcgaccgagtacggagtaacatgacctaaagtttcagatcctgcgcgccattcgagtcccgtgtgactaaaaacatacgttggtcgcattgagattggatatttcctcaacaataacaatataccttggatagactcaactatcaacatgcaaagaatctacatcgcactcctgactccttactccgtatatttgccggtgatctgtattccggacccaacatccctgcccctcctgctccaccccttcgcaagagcttctcccgcttcgattgtggacctggaaggcttcgaccagggttctgcagaaatattgaactgaccacctgatcttaactttgtgcaccctactttgggtgttcatggagagattatccttcactattttattatactgacatgtgcgaactcagattccgccgaggggcgagcgtgaattcaagctacgacgtaaaaggaagttcgcttgaccttccactacctcggtatgtgtgtacgtgtatatcagtccagtcaccgctagaatatcgtgtacatcctaacagcgtcaaccgaattagctgcatatcctgtctgttgtcctatgtctcctaatgctgcctaaaaggatttcgacaatcaaggaaaaagaattcgttcttggtggcttgaacgcggtgtattgaagtagtaggtggctgcctctactttttgcaaaatgcactcggcatcaatgccgggagttaacggactccactccaaagccccccgaaacggttctcaaagtacggtgaggcttttcccgagtctttacatatggaatcggatcaggggctgtcaattcatttgttactaatgttttcttagtctgttactgagaccagattgttgtgttaagactagtcggtaccaacaagccggagatcgtcgcttggtttttccatgaagagcttgaccgtatcctagtcgaataatatgtaccaaacccactaactgacatggggccgccaatagagctaaattcccggatgcttaaggtgctgctggcttcagtacggagtacggagtagcaaccgggatagaagagaatagcgcgcgcgagatgtagatcccgccccagtctccatcgctgccgaatagcatatcacgtgtgatatagggttgtgtatacaacagtggcattatttaaacaaagaatatagagcgataaaaaaagaaagggacaacacgtcaacgtgttctacacgctctatacaacgcacatccgatagcgctccccaacatcatccgatacacacaaaaagccagcgttgttctcggcatatgccggaaacaccgctgaagctaagtccggatcgccgagtttcaggaatccacgcagccaatcagggacgaccatccggtgcagcgggggagaggatcgtgccaccaccaacctcataggctgccgatgtctgtagtcgaaacccagatgggcatagcgtgttcttccacacaaggtcctcttggaggatctgacttgatattatttgggatttttgatcggttacttgcgggctatgcgatttggtttctcgttccgtctacagagaatcgaaggtttgatgttgactttgaaattgactttgagaactgatatcaagtatagtggctaccgtcccattctccctttctccatctttctccattttcccatgtgttctgtggatcggaatccattcgggtacaacatgggggttatggggtggctcacggtgatcaggaacgaattcgctatactaacatagtacctctgtattcttccatgttccatataagtaattgccttgacctggccttggaatcaacgtgtaccagtgaaaacctcccctggccgcgtcataggtttcggatagaatttgatatgaggcgcatatgtgattcgcctcctattaatatctgatactcgtctcgctaccatattctgtggccgaatacagtacaagtagggcaagtatattgtgagccttggaatcctcgatccacaaaccgtggtcgggccgaaccatctgtttgcagtgtaacagggattattgcttgaacaacccatttttattagaatgcataaatccaagcgtctaaaaagcagcctatcggaccgacgcattggatgagaaccccaataataatacacagtcaaaaaaaaaaaaaggaagtaagaatacctaagaaaaaccaaaatctcagttcacaatggaaaaaaggcaaaatggtcccgatttggaaatcgtaacgtacaatacggcggtagactcggctcacccccgacgaccccaaaacagccacttccacgattgccacctctctgacgaccttcttttttattttatttcttcttttccctcggccacggttcagaccgctagatctgtcaaagaaccaaaaagagcaactccagacggtccacccaaatccaggaaccgccaaaaaacccatgggatccaaatcctccaacccgacggttcaaaggttctgggattcgtcataacgtacgccgtacgccgatcccggttcctggggggccttcctttttactctcagcccctgacagtgacgatcgggactgcgtgcaatcagcccggacgggagcgggcttgggtggacaagaggggcctgtactccgtacaagggtcaccccaacacgttttcttcttatgtattcttactttccgcattcttgtcccggttcttgtggttggaggcgctttgagtttttcgttttttctttccttctgtcgattccaaggtttttgacttttgagcaaattatgtactcgtgactatgtattcgttctagattagaaaatatgacaaggaaactgcgcttactattggacgctatatgtctttgactcttatggccgacacgggagtatacaagtgggaccccctattgttatagtaggctcctcgtgttaggggggtgtgggctgtgccccccccttcatctggagtcagattaagcatatctttgttccaacccttttttttgtttttctccgtggcatccatgttcagtgtccaccaccgccggtggggtctcaggggtgggtggtggagcttacaggattctccccggggatcccagcgcagggcacgttgtacaaggtacttggccgtgggggaaggtggttgctgggtttcccgtactttcgggattgggttaggtttcaaatatataacctcgtgtccgggcttgctctgggggtctatgcattgattggcttggtcggtgctttctcatagggcaagtggtgtagattatcccgtcatagagaggtactgtgtacaaagtgtattcgagagatcagcaatttgcatggttattctgcagcgtatattttctgcatgcttggccttgaatacgaaggactattatctatggtgggatatgacgtgctataggcctggactaaccctaatgcagctgtatcgttatatcatgagtgccgttattctgcaacccctcggttaaatcgtatacatagacgatataaaatctgcagtcgctctcatccccagaatgtcatatggatgtcatatagtcaaccttatccagacatttggaactggtggagcagtgagtttgctccatttgctccgtcacatagtctaactcacgccaggaggggcactggggctccatatcattctgtcggatcgatccatatttatggagccagatctatgttattgtttctgacatgcaggtggcgaatgcagacattcttgacggtggattcatctagggccatcactactgtttacagatagaagtctctgcacgaagacggagatattttccccttccgtacattgggtcgagagttctgctctttggttggtggtagtagtaccgtctgctcgtactagaagattgaacatatcaaacaagacgcaccgaaaaatactttggaaatgtaatgacgtgccccacgaggctataatattaagttatgtaccaacatatatcaaatcttatctcaaactaatacattgactgctccacaaaccggagatctagataggtttatctgcatcatccgtcttggaaaatgcagctgcctcagtctctcgagactcaggctcaatgccctcgctaacgtacggctcctgctgaatcgcatggatagcatgctcgacattgactacaggacccgtgaaccagcgatgggcatcaacaaaccaccaaatcgtaaccgccagcatcggcgcaccccaaacaagacaagtccagttcatcatatcaggcgtcaggtctttgccagtaacactaggcaaacacaagatcgggaccatcaaaagcacaaacaaaacaccaacgccaccgatatacgggccaaagggacccagatgccaggggccccgacggaaccgattaccgacaaagaacacgcgaatcgtgatgggaatggcgaaagcaaagaactgcgcaatagcaccaatggagaacaaagccccaatcgccacgtctccagccagaataagaagacacatcaagatgccgaggacggcattcagcacgaccgcattgaccggcgtctgcgtaaccggatgcacctgcttccagtaattcgagaacgggaagcagtcgtcacgggcataggcatacgtaacccgcgacgcggcaaccatacacccctggcccatggagaacccacagataatcgtcaaggccaggatagccatcgccgtcttctgcggcatgacctgcagcagatacgacgcccagggctgtcccaggtcggaatccataacggcctcgatgtccagcaccgtgtatgcaaccaccagctgtaggaaccagcccatcagcccgcccacgccggaggtgagcacgatcgcgcgcggcgaggcgatgttcgcgttcgagcactcctcgctcaggtggaatggcgagtcgtagcccgacatcgtccagatcacgccgacaaaggtcatgaggacggcgactccgtctgggaagtcggttaggttggttatgtcgccccagacttgtttggagggtgtgaatttcgggctgttttttgtgccggcggggatcatgatgatgactgcgaccagggcgatgaaattgaatgtcgagccccatgagttgaactgcgctacgtgcttcgtggacatgctgctgatgccggcgtgcaggatcattatgagggtcgtcagcaggaagttgtgccaatttgtcggggtgtattctgggttgttgatcgaagctgctgcgaggatcattgcgctcagcgagtagttgaccgatggcgctgcggtgatctgtccgatccagttggaccagccggtgatccaggcggcgaagggtccgtagcccggaggtgcgaggactgctgcggcgtagtatagtccgccgctgtatagacgttagccttctgaaccctaactttccttggatgtgatatcgagcagtgtatcatacctagtcggcattgccgaacatagctctgccatcgacattgctatgcactggataaatatcatcgcaatgatccaaccccagaccatacccgctgttccggcatatcccattcctttaatccagtgtcagctataccttgaacccaatcttcaaagcgcagatctgtgagtactcaccataccacagggtactcgcaaatgacggtagcaaccccagaacagcaaagctgacgcagaaagtcgtccatagcgagaactcgcgcttgaactcttgcttgtaaccaagcgccatgatcaccctctcatcggcatccatctcatgatccgtgtatggcacatcgccatccgggagaatggaagtgacttgatctttgttgacctcatgatgtcctttggatatgtccgacgaggcagtggccgttttggtctccatgtttgcgcccatgaccaatataaataggtatggcgctcttaatgtgtgcgatatatatatcaacgaaataaaatgacaaccatacaggggggaaacaggaatgtcttcactttaaaccacagccgagggaagtcggagcataataaaatagcacagactaatggtttttgagcaagtcgacaggggtcagccatgttatctatagcacggagcattttgcgtttcgccccgcatcaagacatgggaagcagctctctacgcaatagtacaccttacaacgaggtgagataagagtcaatgacatatggattgatgtggataaattaaaaaagatagaatgaactgcacaataaagaggtattttattcgaacacgcgatggcctcactgtgcaggcttgtgatttgtagggacgggagataccaccgctgattcgaggcacagggctttgacgatcggtgctacgagcttggtagagagaagtctagtcccagcaaggaagttccaggcgttatacttcacgggacttctgccgtgagacagcgttagcgcatcagatctgcttatcaacctaatgacagagataagggcttgactcgccaggcgtccacgggtgtcggctgtgctgattggggatctgttcggcgttctgaaacctccaggactgccattataatttgaggcttgttatctaaggttggacttaccttgttggggaaaaagggctatgcattgaatgccggagaacccttgtttgtggtatgtatatgtcatgaatacatgcatatctacctagtcccaacgacagcgctatctatagtaagctcggaaactattccatggaacattcggatgtccgacgtatatactccgtgagagtccgtgttcccgagagctctaggtttttcagccctatgaaggtgaccatatttactttgaaacaacggtttctatgtggtattaaaaacaaaatactttcatcgctattctacacagtacagccccggcctgtccctcaaaagctctgattcatatctatcgaaggagagacaggtatataccctcgcgaatgattcagaaggcctaagaaagtcagcatcatatccaaccctccaaatcaaccgtaattgactcacattgtcctcaggggcgatggtgcggtcgtagtagttatcgaggaaaggaagcttgcggagaatgtcgttgcgcacacggggaacctcgccgaagatgaagagggcaccggaaccaagggcgacaccgaagccagcagcgacagtaccactgttgagaacgttattagcccctgtatcctatccaaactggatagtcgaatgcgggatgtactcactactggacggctgtgccaagggtcatacccgcgacggtgcgggggatgtagtacctgcagattagtgaggcgttagcttggtgttctgcttgcttgattgatcggtcttcttcgatatccagctcttttgtcaaagcccatggtctgctccccacggatgccggacatccgtcaagctccgctgcaagaggagaaagacgggaatccaatcaacgagaaaagctgtgttggcaagtacaaggccatattttatttgctccatccaacgtgctgattgccgaccaacgtgtactgtccggggttcgaataagaagggtatgggggagtctcacttgggcgcataggcggaggcctgggcggagacctgggcggcggcgcgacgagcagtaggggcgaactagaggatatatgttagcaattgacgtgacattttctatctcgttttatcccgcggctcggaagccggttgtgatactcatggccttgtcctttagccggagcgcgaccaagtaggcaaggaaccccggaatagaatacggggatttctcatccatcgggtatgaaagcacttaccattttagaatacaccggagtgatttggtgggacaattgctaggagacaagagctggcacttggtggtcgacgaaaaccgggagtgcccgagtttacacgtgactccaaagccagtggccaatcagaggaggcgtaattgttttcgctcaagtatgaggccgagtcaatggattagttttattaaggagagtccaaattttagtcttacatcctgttttttatgctcaggatggaaaatatactaccacaccagatatagatggcaaaagaagtggcacctgacgtaaaaagaacaaattgtagatattaatgcgttaattgacttagcactaggaagccttgcggctcccaagaagctaatacgcctaggccccaaaaattcgcgtgatagctgaaataaatggaataaaaagatatgtgcttcaaaaccccttgatctgacatgcaagggattcaactaagacaggattgatcgaacaggcgcacgaaaggaaagcagcaatcaaatacagtggaaacaaaagattataagaaccacgtagccaaacaccctaactgtacatttgtctcattagtcgactttgtcggtcgagcctccattcaggaacccctctttgccatccaggtggaagaagccaccgttgttggtggcggtgttgccaataataccgccgcgagcagcactacgtctcagacgtccacgtccgaatatggtagccacagcaaccacggcacccaagatgatgaagaagaggatgggatgactgccgaggagggatcgagcaaagaaaaagatactctcaaaagtgccgatggtagatttgggtgacaacttcgaaggggaagcgatgacgagaggaatagtctcgagaatagaggtccgtgaggccataataggagctccacttgaagcagtatcccagtagcggcggttctataggaagtcaggtatagtgcttaaacaaatctcacgagggaagacttacatcttgatcattgataataacgcggtcactggtttccacatcgataccgtaggttgtgcgcaaccagcgttcccaaaagtcgccgtcgacccaagcaaatgcgacttgcttcttatcgtcctcgcggatcgtaatacgcatgtttttcgcagcccgtagtgcacgctgatcattgcggtcgtcggcttcttcgatgcgcagttgcttggaatcacgaagttcagcccgctcaaggcggaagagttgaacctgcttgtccatccattcaagagcggcttccttcagttcgcgcttggattgcttaaagtcatcgcttcggcggcggctgaggagtccgagaaccacgaactttccgtccatgatttcttgggcgttggatgcggtgagctcaggtacgatgggcagccacacagtctgcatccacgacaagatttgacggaaatctctcatgtccttaggagcaagggcattatagtagttgggacgtccgtcacggacgactagaagacgaggccaggtagagatcttgaaccgctcggaaagaggagcactgtcagacttgacaatgcgagcgtgtcccacaagactaagggtgaggcggttcatggcctcgaaatcttcagatgtggtcgcgtggtcgtagagatacaggaacagaacctcttcggtttcttccaacttcttaaaagtagtcgaatcaacatcctgaatgctcgagcccacaccgacggctttgttggtgtatgcgatcagatcacccaagccacgaagaccggtatattcaactctctcgccgccacggaagaagtagatcgtcgggtaggcattcacgcgagcatcttcgcacagtcgcttctcaagatcgcagttcacttcgccaacattgagagtatccttcatctccttggccatcgagttccagttcggggccagagcttggcaatgatggcaccaaggaacgtaaaacttgatgatccatggatcgtgggtagtcgtaacaagactttggaaactctccgcagtgagtgggatagaaacgccctgggggttagcaggccgtccttggagcttggccttgacagactcagcgctaacgccttccaattccgcggtctcgatgctctgcttctcgacagctgttttagcgccaggctttaccactgcaggtttagcggtcatttccatgctctcagcgccggcctttgggatttggatgccttgcgaaggtcgggtcccaggcttgattgtctcgagtttggcttcaatcatagcggcaatatctgacatcgtcttggcacgcgcggggggttcgttctgaacgcccatatcatagaacgcccacgcggggtaaaattcgacgttcagcttcttgcagaaatcgccgaaggcctggcagtttatggacccgaaatggagattatagtagccagtgaatgagtccagagacgcgagctcatcgggtttcaatccggagaggaataaaggatttgatgtctatcactaatcagatccaaggctcaaatgttgaaataaggggatagattctcacgtagtagtactcatacagggtctggtacaatggggcggcgatccggcaatgcgggcaagagggggaataatgtttgatcatcctagaatagttagagccttgagcggtttattgattgctgcagaagggattctcaccagtaaccatctttggtcacttcctcgaaattctccggggtcagctcggtcaacgggggcacttcaataccattgaatattgtgggtttgtcggtatccactccacgagacgcccttttgacaagtgtatttccagattgttggtcggaagcatctgaaggcgtacccaaagcaggcgctaccaacagtgagaggagggaccaccccagccaagacggtttcattttggtaaaagaaaaaggcgaataacttggatagcagtttaaaggagagtataagtagtttcaagatgtcaaagctgagcaaaacgaaggactctggtcgaagtagggaggataatcgcgaaatgttacaggtggcacattggacgggggcgaagactggcgactcgggtgggcactggtcacgtcgcagaaagaagcagcacttagcgactatagcgcccgtagctgagagcaaaatagaactgcacacagtccaaacaaagaaccagatgtgaggctttgatggtattcggcaaaggtaagttgttgcgtttccccctgccgtttcactatggaacataaagttaatccgctccgggccgacttcaccacttcatctccctggaacagagcgacttcaatatcaccaaatccattcacaatgcgctccacactccggctactggccaatgtcaagccccggtatttggagccttttgctcctaccggattgacgggccttttcacccaccccagccctcgccctactttaatctacctttactcgactactctgcagaagttgcaggcgttccccgaatcctccgcctaccgccaatccgttgaggctttgacccgacaccgcctccaagtcattgagtcgcaaaagcccgccggattcgatgcatggttggagcgtgtgcggaaaaccgtggcagccgaacctgagcggtttgctaaggtccagcactccgacggcacctacacccatgccgctgcccaacagaaggatggatccgacaatgctcgcggtgaagaatgggatggcgaagccctctcagctacaaccgagggtcccgcccgtaccccgcaacaagaaggagaatggcttgaaatcatgaatgaggctagcgagaccaccgacaaggccgatcatgacttccaccacgaacatatcaaatgggagagcgagcctgcgcttgatgtcgaccagtatgtgtacctagctttccgaattgacctcgaacaatcgcgaatctaacgctaatctattgcgcaggatctctcacatcgaacagcagatcggcgccggccttattgaggagatcatccaggtcgcagagacagagctcaagcttgtggatcagttggccgaggccaaggtgtaagtggaaatttgaagattgtggtttagacttcttgctgacacttttacaggtgggaggaacttgaggaaaagccccaacccggccagtggtcctacttcgagcgtggtcactaaacagcaaatctggaatggctatgaattttaatctctgtaactactactagaggtctctttgtttgaatacatgttttgagagttcaaacatttgaaattttagagtgagtcgtagagctaccaagctatgattcgcatattcgacgaatgaaggtataccagcaatttctatcggacatgttgatctaattgagacatgtctatagcctagtatataggcaattggtctttcagtttcaattttatacatctgggtgatgattatgtacagcgaagtatatcgaaagtatttgagctattgctattttgtccagatccatacttggaatataagcttacatttcaccaatctcacatagcaatccgtatagctttcttcaatgcaaatgaatttgtaggacatttgtatagcggatagaccgactagaaggcggtgagccaaggcgggaatcccttgtggacacatacattgctgtccctgaatgaagcgcactccctcaagctctccttcatctcaatcctttcttaattcctccaattaataacttgccccgaggatcgctcctccctatcattgggctgtttgagcggctcgcgaaatctcctatcgctgtcacaggcccaacaccgcatcacacaaacactcgtctcatcccccacacaacatgcggctcgacatcaaggtacgcacgataaaacgtttcatatagttgcaaatctgctcttagcacatacagtgatatgatttcgcaggtgaacgtccacaattggagggattgctgacgataaatgttacagaggcagctgtttgcccgctccgagcgggtaaaggggattgatttccaccctacagagccgtgggtaagctttttcaattcactcagtagcttcgctcaaactaatttgattcttagatcttgacgaccttgtatagtggtatgttgagggaggggcagtatgcgagacgtacaatgcgctaattactttcctgtataggccatgtctacatctggtcttatgaatcgcaggtaaggcctgacacagatttacactccctatactctcgtctaacatgtctaccctgtagtctatcatcaaaaccttcgaactcaccgatgtccccgtccgtgccggtcgatttattgcgcggaagaactggattgtctgcggttcagatgacttccagctccgggtctacaactacaacacatccgaaaaaatcacctcctttgaagcacacccggattatatccgttctattgccgttcatcctacccagccgtttgtgctcacagcctccgatgacatgacaattaagctttgggactgggagaagggttggaaatgcgtgcaagtgttcgagggccacagccactatgttatgggcatggcaatcaacccaaaggataccaacactttcgcctccgcatgtttggaccggaccgtgaagatctggaacctcggctctccccatgccaacttcacactcgaggctcacgagacaaaaggtgtgaaccatgtcgactactatccacaggctgataagccatacctcctcaccacctccgacgacaagaccgttaagatttgggactacaccacgaaggcactcattgcaaccctcgaaggccacacaagcaatgtctcgtttgcttgctatcaccccgaactccctgtgataatctcaggttccgaagatggaaccattaagatttggcatgcaaatacctaccgactggagcagtcattaagctatggcctagaacgagcatggtgtgtttcctaccagcggggtagacagggaattgcgatgggtttcgacgatggtgctgtcgtggtgaagatgggtcgggaagagcccgccgtctcaatggatgggtccggtaagcttatctgggcaagacacagtgaggtcgtgtcgtcagtgatcaagggtggcgatgctagtgtcaaagacggcgaacccctttctctaccaacaaaggatttgggacagtgcgaggtgtacccgcaaaccctgtcgcactctcccaacggacgttttgtttctgtctgtggtgatggagaatacatcatctacaccgcattggcatggagaaacaaggcctttgggcaagctctcgattttgcctggggtgcgaaagacaacagtaacgattacgctatccgcgagtcatcgacaagtgtgaagattttcaagaacttcaaggagcagagcgccggccttgatgttgggttccaagccgagggcctctctgatggtgtccttctgggtgtgaagggtcagggtggcattggcttctttgactgggagactggcagcctggttcggcgaattgaagctgacccaaaatccgtaagtttgctctaccttgatatttggaaattatgctaatggacacgtacaggtctactggtccgaatctggtgaattggttaccctcgcctgtgaagatgatttctacgttctccgctattctcgcgaggattatatcaacggtctgaacgccggtgaagccgacgaggatggagttgaggcggctgttgagttggttgctacaattaacgagaccgtccgaactggacagtgggttggagattgcttcatctacaccaactccacgaaccgcctgaactaccttgtcggtgaccagacctacacaatctctcacttcgaccaaccgatgtatattcttggctacctgcccagggatggccgtatttaccttgccgacaaggacgtcaacgccgtctcctttagcctttcgctcagtatgcttgaatatcaaacagtggtgctacgcggtgatatggaaatggcatctgagctcctcaaggatgtgccccaagaccagatgaacaaggtcgcccgcttccttgaaggccaaggatataaggaaatggccctggaagtcgctacggaccccgagcaccgcttcgagctcgcccttgcgttgaacgatcttgaaaccgcactcacgattgcccgcgaggccaatgttgagcacaagtggaagattgtcggtgatgctgccctggccggctggaatcttgctcttgcccaagaatgcttcaccaatgccaaggatgtcggttctttgctgctgttgcacaccgctagcaacaaccgcgaaggactcaaggccctggccgctcaggcctcggagtcaggcctccacaatgtcgccttctctactttgtggtctctgggcgatattgatggctgcatcgctctcctcatccaaaccaaccgcatcgctgaggcagtccttctcgcccagacctacaagccttcaagcgcccctaaactcgttgtccaatggaaggagtccctagagaaatctggcaagacaaaggttgcccgccttatcggtgtcccgcccggtgcccccgatgtcgcctctaccgatgacgatctcttccctgagtgggatgagtacattcgcctagagaaagagggtaatgtccccgagcccccttcctcagagtccttgattgatatcaacggcgatgaagaagaagaagaggcagaagcagagcccgtgagtgcgaccaatggtgcactcgaagcggatgaggaggtagagaaagccgacaaggctgcagtagatgaggccgatgctgccgaagccgagtgaacgaacaaaaagcaccgggttctgtttggtgacttttcaggagagttaggttgatcgtttgttttctggctgaccagtcagttcattcttgattgcgagcggcgtcttaacgtgtgtccgactttttttactctctcttatttgtaattgcgctgtcatgagtctctggagcaaattacatgcctagatacaagcaacatgtttccctttatttctagtcatttcttggttgttttattagatcattgtacatgtactaggtactaaaccggattctccttggtgcttgggcttgtatgagctcatactctgtgaacgttactgaaggcttctagtgtctagtagtaaaaaagacatgcctgaatgggccactgtctacctgctgccctgcggtgcagttgctgtattctggtcataaaatagaatacaccacgcacttcgcaactgaaaccgcccagggacgtgatccatcctactcggagactaaatatgatgcagaactgtttgggcattgtccatttgagagttttatcgagaatacaggacaagggtgcagacgatgaccgcttgagaaaagcaacgaaaccaagggtaagaaaggaacctgcctagagagaatgaacacttgagatggaagggagatgaccgaacaagacaggaaaatcaaatcaaagcgctcaacggccatatgaaacgacaagaaacaatgtcgtctcgaagatcaggagcgcctccgatatcaagatgccacagactccgttgtgatggaaaaaagaacaatatgatggacagagcgaaaaaagggaaaaagaaaagatcaagattggtcgatatgttaatgaaagacatatgcgcagttagaaaaggaaatggtctctatgaacctcttgtctctttctcgcagcaggaattctcgatctaatttgacgcggcgagaatctctactccgcaatgctaccgaaggacgggtctttaacactgccgcctgcatcgccgaggccagccacgggtcggttgtatgaccatccggcaaactgttgctgcatggtttgcgacaggacggggccatcgacatatgagtcctggggcgcctccctggtgaattcaacatcaaagttctcagtatcacgggcatccacctgcattaagttagccacatgttggtccattgcatgatcaggagtgaagaatacataccacgtttggtcggaagctgggttcatacttcctctgcagaagcttacgccagtcgatgttggcaaagaagtggtgagacttgatctccgcagcaccgttggcacccagtcggcgcacagggtcacggtccaacagtcgactgagaagatcccgcgcagcaggcgggacgatgtcgctgctggggaaggtcaaaggctcttgcaagatcttacgatacatttcgttggtgttttcatcatagaatggaggcaggcctgtcaacatctcgtagagcaaaacaccgagagtccaccaatccacagtcttggtgtagccgttgccaaggagaagttctggagccagatattcaggggttccacagaacgctaagtttggttagatatgtagggcgtatcatgagtggtgagatcttactattggttcggtcttcatctttcatgtctagcttgcagagaccgaaatcgcaaagagcgatatgcccggtgtaatcgagaagaatgttctcaggcttgagatctcggtagatgactttgaagccgtggagacactcgagagcgcacagcaactctgcggtgtagaaacgggctcggttgatatcaaatcgttgctccctttgcaaatggtggaacaactctccgccgttcacaaatgctaacacgaagtacagcttctcaggcgactggaatgaaaacttcagcggaacaataaacgggttgttaatttgtgcaagaaccgatcgctcggcgagtgtgtgtgtgacttccgatcgcgagataatgtgagccttgcgaattgtcttgagggcgtagatccgaccagtatccttcttcctgttaatccccgactgttagaagtttggacccatataagtagatatcgagtcaacctacatgacctgcatgacctttccgaaactacccttgcccacaaccttgagcaaatcaaagtcttctaatttaagactccgctgcttgttctccacaaaggaaataccaatcttgatcgagccaacgccaaattggagatccagccactcagtaccttgatgaccctgttgacgcccttgctcatcatgagctgcggcggccttctggttatccttcttgctgagcttcggatcctccacatatggctggctctcttcaaagcgagggttgaccttgcatgcgcccaagaagatatcctcactccgtccggcaccaggccgggcagcagggttgcgcagatacagctgtacattcaactcggtcttccgggacacatcgaacttgaaggctgtattatcaccagcccacaatgggctctctggagttcccgaaacggcatccacaaagacctgattcttctcgaaatcaaggagggcatacggaaggtatttggtggaatagcgaccgtggatagtgggggcggcattgattcccccacttgtggactggggtcggccagatggcacaaaggaacccgcttggttctgagatgaatgtgacgaagaagaggtacttgggcgcagagaagaggacgcgtaagagttattttggaaatgcgagttgaagatctgttggaagtgaggtgacaacgaaaaattgcgcccttcgtggagagtgacgataaggattcctgggttcacaggggccacaggaggagatacaagagactcggaagccgctatcagaacgatggactgattagttactgggggggaattctagtaataagaacaacataccgatcccgttcgttgatggggtggcggagggcgggttagaggcgacaggtgtcagagcctcatcaccatttgagtcacccttgatcgtcgaagtagacgacgaccggccaaatgatgaggtcaagggcgccagatgcgtctccttcaactcttcagacgagttggatcattagcgactgcctctggtccactgcagtgcagagaggggtattgaggggggagagagggagaccaactgccagtaaacatacttttagtgagcttccaggacatagtggcggttgttgtaaacagatcgaaaagaagagatcaaagtccaaggtaccgcaatgcgtgtgcagggtgctaagaatcacacccaataatcaacacgcaaatgccccccaaaataaacctggagagccacacaaggacacagatgataccacgcaaaaggaaaggagtcaagacagagacaaccaccactatagcttttgaaatccgaatggaagcacgactaaggataagaagaagtcggggagatcgaagatcgaatgagaataagagaggggaagtcccccctgtaattataatacgaagtatactatagattacctaatattacctctttgattggttgagctggtcacacactggtcactccaaggtacagtaattaatcagcctcagccactgctccgccacaagggttaacgacgcatcaccttccacgacttgaacaatcaaggcagttgactccacagaacgaggaagtttgagatccagcttggatttgtattggtatcattttgcctactctcccaagttccggaatattccccgctccgaagtgcggagacaccttccccggaatatctaacctcaactttcacctgcaactccagtactctcagactcctgactctgtttctctcgataccgcaccggacaaatcctaggatgaaagggatggaaagataatgggtgtgatacgcaagaagaccgcctcgcgcggcaccgaggccggcaccaagttccactgcgatgtgtgctccattgatgttacgtcaacagtaagtcttcatgtctgtcatggccatttaaaggtctgttgttttgttcagagactaatgcgattccatcgcataggttcgcatctcgtgctcgcatcccgcctgccccgaatatgacctctgtgttccctgtttctcagccggaaagaattccaagaaccatgaccccgccacacatccattccaagtgatcgaacagaactcagtccccatattccaggcagattggggtgccgacgaagaactgttattgctggaaggcgccgaaatctatgggctgggttcctgggcagacatcgcagaccacattggcggctaccggagcaaggatgaagtgcgagaccactactacaatacatatgtgaagagcgtcaactttccgctcgcagcccgtgccgatccagacgatagggccttgcaggattcgatctccaaagaggattttcaaacacgcaagaagcgtcgcatcgaagagcgcaaagatgcagccaagacagcacctccaaccacaccaaagcagaagccgactgccagtgtaccggcgtgtcacgaagtgcagggctacatgccgggacgattggagttcgagaccgagttcttgaacgatgccgaagaagcggtgcagcacatgacttttgagcctggggctggattcaatgaaaatggcgagccagacgcagagaccgagctcaagatgaccgtggttgacatctacaactcccgcctgacagcgcgaacagagcgcaagaaaatcctcttcgagcacaacctcctcgactaccgaaagaacaccgccttagataagaaacggtccaaggaagagcgagatttgttgaacaaagcaaagccactagcacggatgatgaactgcaaggactttgaagacgtcaacaagggcttagagtacgagcacaacctccgcctagccatctcccagcttcaagaatggcgccagatgggcatcggtgacctaaaggcaggcgagaagtacgagcaggataagcaacagcgcgttcaacgactgcttcctcaaggatcatttgaccgttttgccagcacccgccctaagcagtcacagctgacagagacacccgcggcagcgattcagcttacaacacctgaactgcctctgcgactgcaaaaagcggccaatccacacgcaccagcggactccaccgaagaaacactgaacgatttcgatcgcgccttcgctgtcgatggggatgcgcctcccccgcagccggcaaagacgaaatatgtggtgcctccattaagcgggatgccgtcgtggaagctggacaatgagactgctgccgatctgcatctcctgaccaaggaagaggcagaagtatgcaatgttctacgcctgatgcctaagccatatctggtcatcaaggagacactgttgaaggaagcaatgaagcagggcggcaacctgaagaagaaagatgcacggatgatttgcaaggtatgtttctcactcgactcttgcatgcggactcttactgattctgttagattgagggcaccaaaactagccgcatttatgatttcatggtacacagtggttggatcaacaaggcgtaggtgcgccagatccatcatacgctgtaattgcttctgagcttattgatatccaaatctatttgtgatttcgttcgggggcgtttttttttcggcgttcataaggaacttgggaggtgggcggatgtattgatctcatacggcacaggcaggttgatttatcacctgcaattcgtacaattgtacaatgcatagtaacatacagctatcgtctagtgtaaagcaacaaggccatagaacacttctaaagccatccttgatagagacgtagtaaactatcccccacactcctcggtcctcggttctccgcatctgcaaactacccccaacttctgtcgatcacctctagtttcctatatcatttccttaattaactcttctttctcccctctcctcaataaaaaatcaatctctcctagaaataccaagaaatcaaaatgccatccttcacaatccagcccccgaccccagcccacgcaaccctcacctacccagcaccccacatcctcctggttacgctaaaccgaccccgcgatctgaactgcataaacgcgcaaggccacgcagacctccacgccgtctgggaatggctcgacgaagagccgagcatgcgcgtgggcatcttaacgggaaaaggacgagcgttttgcgccggcgctgatctaaaaggtgagcgcagccatgtctacatacatacaacagcaaatatcacaacaaccgcaatctcacaatcccctaatgccctaatcccctctccaatcccttctaacaaaccgctaactcaatccagaatggaacaaccgcacctcatcagcagcaacaacctcaagttccacaacgccaatgccaaacagcgggttcggcggactagcacgacgcaagggcaagaagcccgtgatctgcgccgtgaacggactctgtctcggcggcggcacggagatgatcatcaacagcgatatcgtggttgcgtcatcgcgggcggtatttgcgttgccggaggtgaagcgtggggttgttgcgcttgctggggcgttgccgcgacttgtgcggacggtgggcaagcagcgggctatggagatggttcttacggggcggacggttggggctgtggaggctgagaggtggggacttgttaattctgttattgggattggtgagggggatggggacgaggagattggtcgggctgttttggggaaggctttgggggttgctgggcagattgcggggaatagtcctgattcggtgcttgttagtcgtgagggagttaagttggggtgggagggtattggggcggatgaggctacagcgatgttgaatgatacttgggttaagaggttatatgagggggagaatatcaaggaggggcttagggcttttgtggagaagagaaagcccgtctgggtggatagtaagttgtgagattacttttttaagagaaggatggcaaaggatattgattttccattcgctattcatagttcagttcagtcagttcagtcagttcgtaaagtcatataaaacactgatcccattactcccgcgccgtatacctggtattcgcgatattccatgcaagttgaatttcagtcaaagcgaaatcaaatgcgcggttgccctgcctctcttctgaaatagtgatgttaggatgttgtgagaaggcgcaagaaagaggtgcctactttgcgtcagattgtacgcggtccacgaccttgaccacgtgggggaagagagggtggtctcgttccaagccggtcaattgggcagcagcgtcggcaggcgagttctccttgaggaccttggccaattccacactctcctcgtcaccttccacattctggaaccgcatagccatctcaagagagcccatcagtgcgtcaaactttccgccacgctcagccagctgggcagccgggccgatgaaacgctccttgcgggacagtttgcgcattggggcacggcccactcgctcgaccgtgtcctcaaggtagtggttggaaattcgggtgatgatggtctcgacgtactcctgctgctcggcggcgctgatctcatgtttgtcgatgatgagggaggcagtctcttgaagcacgttacggacaatgccgcggatgcgagggtccttgagggcttcggcaatggtcttcttgccggcattgtagccatagtaggccgcagtggcgtggccggtgttgacggtgaacaacttgcgctcaatgtagggctccaggtgaccgacccagtgaatagctgggatgtctgggtgaccaaactcgccgaaaggagtggactccacggcccattcatagaacttctcgatgcgtacattgagaccgctgtgggcgggctggccaggtacaatacggtcaatggccgagttagcaaaccgggctcggtctggcatagagccaacacggtctcgggcggtgttgtctttgatgaactggtgtagagtgtcagtggcaccgatagcgttctcacaggcaatgacggccaacggtgtggtggcggtgcgggcgtcgatacccttggcaatgacgggagcgataaacttgaggatgttcggacccacggcacaggttacaacactggcggttgagatctccttgatgacatcgctctcatgggtcttggagttgattgcacggtagttggtgatggtcttggtagactcgccctcatcactgacctcagtgacctcgtaggacttggtgttttgtagagcagtgatgatgccgtccatgacatcgacgaagacgacctcaaagccagccgtgtggaggaactcggccacgaagccacggccgatgttaccaccaccgaagtgaacagccttcttctccatgtttaagttgaagagatgtgggagtataagtgggaattgaattggaagtagaagtagaggctatagtagagtagagtagagagagaagtagaagtgggaggagaagtagagtagagtggttaagactaaagaggaagtcgtgtaagttgcagtttctccaggggaaagtgcagctatttaaggaaagagggggaaagtagggcagaaactatgaaaaggcctaggactatgctcgtcccttggaaatctcacgatgacttcatagatagctcggcgacgggactaacctccgccctgtttaatgaggacatgatgaatatttcccatccctgtattattgctcgattatttacttgtaattctcgatttcgctccaatattctaaacaaagaggattattgacccgagagatgttacattccttcttcttcctccccccgctttcatgtctgtgcaactccaaccaccaccgagggcatacagacaatacactattcccatttgagcaacttataggtttcgtttcatgcgcacgcttgaaccattcaccggcaaaagaaaagaaagcaccgggaaaacccgcccatattggtcaatacttcgcgctttgacgagaatcttggcgactacagtcggaaaatcagccgggaaaagtccaacggagtacagtggtcctaggcgtctgagccattatatggaaactgggtatattggtttgaggtataatacatggttactccaaggaaaattcgagactcttcacgatattcaatagaacctcaactgatatccacatgcggtgacgtcggatgaacggttgacccagttttttccccattaagtagcggccaactccatcaagccgaggtctttattcgaagtacgtctatcgccttccacgcgctctcgctctagccccgatggactatcagatcactgcctggtttgcactgcccaacatgcctgagcccctggaagttagggggaaaaaagcctcaccctcgaggtccctccgggcccgaccattggcccctcagatatcgcaagccggatgggcaattttgcaatttcgctcgaaactagttagattggccactgttctctattggttacgcgggaagaatctgatgggtgatatcattcgattcataaatggctctctatctactataggacggattatatgcgattctgcgagtttccccgatctccgctcccccatctgtaacctgcgctctccgactggctaagaccaccgctccctgtgctgattacccctctatatcttttgagacggccgcaggcgcatatccagcccgtttgttaacatacacattcacaaagcaagcaacgctaccggcgagtaacagccccaccgcggcccaagtcatcccaaggaatttctcgccataatgggctgtcacgttcgagcccctgccgtgggcattaatcagagcgacgaattcaaaggcgatgaccgttgcgattatggatgcgacgctgacggtaaaagacccgacctaattttatgatatcatggtcagccatttgcatttgccgtgttctggggaaatccgaactccgaactggaaaatggaaatgcaccacgctgaactgggaagtacactccagtactgcctgcataaacgacctgcacaggcagagtttatgtagggggctaactcgatcaccagatcgtgttcgtgtatatgtcactaactcaccatgaaaaaccaaaattcaagcgggccctggcatgcgcgcggagcgagagtcgtccatactcgtacaagcatcgcagcgcccatcgcgccaatgccgatacagtacatcaccgccatgacttggcatgtcattctgaacgcgtggaagtcgtcgctgatcacgcgctgccacctcatatccggactggaggtgagctccttcggccaggcttgtgtcgggtcaaatgaggatgaaatcgcgcggttcgagcattcggtcacgttgcgcgtgacttctgtgcctgggtcgatggtcaccagtgttccctggcagtaggacatgacgtggacggaatataaatcgcgcactccactgccggtgctgtctggtgtgtagagctaaatggataaagggggtcgagtcagtcttctgactctacctgccacttctagagagtatttggagacggtcggacttaccgttaagatatccacatcgtcgaggaagttcctctgcgtccctgagaagagacataggagggtgagtataaacgcgacgaacactgccaccgtctggaataggcccttgaagtccgacatgacggcggatcgggtgtatgcgttggtctggttctggtggtctgcaagatgtagttggatccggtatgcagcctctggggatgaccacaacagatgatgcggaggctcgatattcaatgagaagacagacacccgaatctgcgattctcgcccggttcgcgatccttatatacataccataatggaagcgggatagccggcacgatcggggtcaagatttctcacgatcgcttcattccagacgtgggctgttagaaagggcggggacacatatattcttcatagtagtatcgagagttaattcttcgtggaatgtatgcattgcccgtaattgcatacagagcaaaagccatacggagcgaaagcctacagctattcgaaatgtaagtctggagtagccaggtatgatggctgggaaggggatgagcgtggtcttgtgctcttcaggaatgttgggaatgttaccagccacgaaggatcttgcatgtcgatatcgtacttgtgttttattagtgggatctggcattgatgaattagtttagataatattagatatgacttgagcatgaattgtatctatgggctggttgggaatatttcaatcttagagatgaggggatgtgccagggctatatattagaccccaagagaccccaagagaccccaagacatttgacgtcagcgacaagggtttcgtacttattgccttggccatagacctttttgcacatgtttttgcgctaatctccagattggttcagcatcctagaaattctcggcacaaaaacctcaattctgagtcagtcgggatttcagcccagatcgaaatttacccgatcaagccatttgccttgtttgagtggaaaacaactaattattatggcaaatgttgaagaaataaggaaatactcgtctcccaatacgatttgacttacttatgttcctgtacggcgtgttatcatcgaacaaggggaagtgtagtccctggcggagacttgttgagtataaacatttatggatcgctatctctagtttatttcgattgcatgtttactgctgaccttgtcaatttgcgatcaaaaggatcactgcatgaatttgatcaactatgttcttcagtctgttcttctcgctttcccttttcttcgttcgccttttcctcctggctcttcgattgttggtggaaagccaatgtatatgcatccgggtcccacgataagactctggtattcatctcttgcagcttgcgatctaaaagtagttccatctcatccttttgtccctcatccaacagatcaaggcgttccttccaggcgtcctcgatactttcggtaggtccaaaaaatcgcgagtcgatcttctgccaatatataccatcaaaagcaaagctgtgcaacgctgcgtacagaatccagaagtctccactctcccagctgtcattcataggaccggagagttgctgatcttctcgcaatcgaccctgttggattgctatatcttcacaattcttcatcgctctgaggaagatctttagacgacatcgaacgacctcgtccagtcatcgaggccctttggccagtcctcaggcttctcaatgagcagccaccaaggtggcgcataagagaattcagtgggtgctgcgtacgtgaactcccagtccaccacgccggcaatatgcatattctccttgaatagtacattagcgggccttaaatcatcacaccaaagtttgaaaggctctttttcgagtaacgggtttgtaggtttcttatccctaacgagcttgcgaaagagctgccgcgccacaaatttccgccgacagtcgtctgcagactgcaccgagtcatttctctaatgaactaaatgattgatgttgagttctgcaagcgcttcgatatatgacgaagatgtgtcgaatgttgtatgtaggccgggcagtttcgaccgcggtagtccccctagtcgaacaagttcattcatattcattgataaaggccgaagtactacttcccaggtgaagtcatcggtctggctaagggatcctacgcgaggaaaagaggggatagagagttgaagcagtactcccgccagctgcccatacagcatttcaagcttatcttcgtcgatatccgggtctaggattccacgttgccctttcggacatctcggtgtgttaagagagtcgtgaattttcgactcgtggtcaatataatccataataataaatgagctgagaccgaggggactctcttccttgtacccgagtgaagaataaaaggaacaggtattgaagtttggtcggcgaggaaccgcatgacggcgacctcattcacgactttttcctcggggaaaaggacagcaccgggctgcgatagccggatcacggtggcaccatttcggtactttaaccgcaaggatatttctgagtatggcaaactcggtagcaatgcctctgttgtgagtgaggatgaaatctgcaatcggtctgaggatgtcaacttcaagaaattgaacgagccacttgtcagacgtttcctcggcttattcccaggccatatcgtcagggcacatttgagtctgcatatttgcctcttgttcaattgatgcacaataagattagtgagataaagccgagaagagggccggaacatacagggttgtgggtttttttagattttggagagacagggttattacatgactattgggggctcctagcaatcggcagagtcagactcatgcagatgcccaaggggaagacaggaactctgccaaaagccgagggaaaggacggggaaagagtttcaagccaggagctcggatttcccggcccaagataggagaacagtatccacaggtcgaagaatctcatgagaggaggaagcatatcactgccaattcataccgttctagctcttgaagagtctgctactagtagacatcttcatattcaccgtcttcatttcgttgatgtagagtggtcttctcgtttactgttcggatctgttcctaccatttcctcccacgcgatgggcaaatggcgaaggagcaacggcgaattctcattgaagcttcttcattaaatatatttttgcatttctagaaggatgcttgaaatagaaatgcgtctctgcaatgtcgcattgactcggagaccatctcatctctaaagagttattactgttacctcaatctgaaggctccgctgtgaacatcctgacgaatcaaatgcacttttcggggtaaccttgaaatctcctataatagtaagataaatctaagaattatatagaaaatgtaaagtgtacatcaaagacaccacatatattgcatactgaagttcagctcttgcttcaaacatagttacttgttggttcttttgtcattgatactagtaacggacttcatctacactcgatatatatcttgctatattcacatgtctatgacaaagtatgcattcgcaaaagggcaacgacacacgacagacattgccacattcagatgttcctgttcctatcatcacatggctatatcatcacgttaccattcacattaagcgagactatgtcgttgtttgtctcatttgtgaatagtggcataaaccgaccgcccttaggatacctataagaaggtggccctgcccccagaacttcttcttcttttctttcttcttcagctctctttgcctctggcttagatcaagtgtagtatctgttcttgccagtttaatcgctggtagttctgcattgcagaacgtcatgattattccaatatttggacctcgcgacttggcctctgtgcttgcacacgcctcgttgcactgtgtcactgggcttacactacccccggtcgacgcgaactccttttcatcaactgttcggcttgcccgggcgcttggagaagatgtgtgcttaggatgtacgtccttgccaagtggttccattttataccttgttctgtttcgtatgtatattttgtaactacccatggtagagacagtctcccaggcaacaataatgaatgtgttgagactgtttctgtcttgggttggtgagacctgctccctaccatgtttgaacaccaatacaacccatggcttccttccccatcagaatggcatctctactaccccctgcctacattgtatcccatgtttactgaaattacaccataatccccgaaccagggcaaacagagttaccatacgtaattaccttccaaggtcggaatttttgacagcaatgatcaaagtatctgatgtaatgcatatttcaagagaagcttgaagctgccaaggaattctacaactttcaatccaaagttcttttccatctattcaaccatctacgatctgcagaaggacttgtttcactctagatcaacctgaagtctttccgacttggccagctcactattattgggagcactattaatcaaagacaatctcccatagaggtctgctttctggatcctaggtagaacggatggcagaacaaggacaagtgatcttcctagctcatctggtttgatatacgtgtaacgccttgtgtacattgttgcctgctaggcctgagttatagagtcgagttcctgttggtgtgaacaaacctagtgtgcgatagttttagtggtggtttttcatggtttcttgcttctttaaccattcaattcatctcatattgcgtgcactttgacctgattcctcagtaggcctcgtatcattagagatgtcactttatcttctgtcccctaagctgagggtcatatcctttgcgaaattaggagttccaaatgtattcgttcagggtgaatagcgaagattctgctgaacctaggaattggctcacggccaacctatttaggacatcggagacattaaggttctgaatggattagttgtggaagttgcacatgtgatcatctccctctagggctgaaattggaacatcggatgattatataaactgttagcctatcacctgttcatggatgaattagtccgtgccaaagcagggaagtgtagactgaccctaggagattacacgaaaagaacttgcaatgcaacgtatgtcgaaagttgataatgacacagtcggataggatgagccattaatatctgactcaaatgactttgccaatcagatcactaaacgagggaactttgtataagactaccagtgtagcttttagcgcgccctatggggatgagttacacaaccacgtgaagcaacatgcataacaaagagatcgaggcaaaataaaacaaagtcactagtacccggacttgaacataagtttgtggtgccgatgtgagagaagtgtcacctgggccgcgacactaattattgattattctgaacctccacgggttcgtttgagtggctgtatgaggttcggagataccgaaccctatgtacgtacctaaggttcctactcggttatttcgtcggccgatgtcgaagtagtgctatgtaccccgtatccgtacccatcatgggacgacgcgacgcggtctggacccacagaatctgtagggagtacggagcagccaagtgcttaatgcgaaacagctacgggagggcagctggaatagggcaatcttcctctgctcttctagaaggcgatgtatgccgtctgcaagctgcaagggcggcattccagacggagcatccacgagcaagacgaaataagcaaaggaattcatacatgtcttcattggtagccgagattagtatccacgcaaagcatagcatatagcgcaaacccccgaaccgaaacggaaaaaggggaacttgggccgaattagactgccgggcgcatctcatacgcaaggcacatgtgtggatacaaaagtttgtctgatacattcccgaggatcctaaggtaggggtgttgaccgagacatctaaccacatcaaaccacgcgtgaattccaaggttgacatgtttagcgctggcaactgaccacgcgaaatgcgagcacgtgcgtgttattatcaaattcaacccgtggccgaccaagccttgtagaagctcacttggcgacgcctcgccgggacgccttttattgcttggtggtcttggaatttcttgggatgatgcgagcgacaagagcaagctttagccaagagcctaggaagtcttgacatgtagatgctcgcatgtctcgatttcagatgcgttcgtggtcccaaatcggtcgaaagtatacaatcctagtattgatagacgcggatttcgcgtggcaactcgcattgatgttaatctaatcgatatcatcgagtagataccccggctagatcggaatgtagcacaacagtgacatgcaacgcgccaacacgtgttggaggtaagttcagatttcgagggaaggtgcgtaaaatggggttgcacatgttccaatgcggcccgctgattggccacagatcatgcatggacgatgtcggggttcccaactagcgtggaactgcctcagccactacgtcaatattaaatggtccagatgcggcccgttttgggacttggggttccatatggaagagattaatgggagagagattgcttgttcgctacgaggcggcgtagatattggacaatggcctcagaaaggctgcacgtgtgtcaaagcgtgaatgttattctgcttggaaccgagatgacctccggctccgggactaggtgtttggaggttgccacttggcccgaggcatccaattgcattggcattgccttggcgtgaggtgaggtttagctaaggatgcagtctatatagatcctgtccattgtcgatgcttctgcatataacagcctaattgtagatactccgtacatgtatgtaggagtaattatttattaaacatctaactcaaacggtgaacagaatttatcggccccgcgaaagtttgggaagatctgccttgaaccgcaggcggtggcaagcagagttgggattctgcccccacgtgcgcgtttgattggtctccggctgccccatatcagacccaccgggcccactccgccccacttcaagtcgaaaatctgcttccggagccaaatccagcaagagtagacccataaccgcaccgagacagggccccggagggccctgaccccgagatagagtggttcctaccttctgactttccaagactttttttcttttttgccaattttttctgagtttgaggtggagacgccactgaattgtgccgttgcatgtcgtccacgctccggttcgctcacttctcactccttcttcctccatccttttccatacttaagaagtcaatcgccgcctttctgggttgaagtcactcaccttccccaaccattgtggtcacttcgacgcttccctcccccgagttgaagcttacatcaagcaaggttcttgctcacgcgacacatctcagtacactcctacgatgaccgactttggtcctcgtgcccctcatgggcccgacatgtcgggagaccataacccgctggaggatatggatatccatgagaagggtgctttcgattctctcattcgccccgacgacagttacacccccgagggtgtctactgggccgatctcccattgtggaagaaaatcacattcgtcacctcgtacaacaacatggaggcaaagcgagagctgggtggcatttgggctatgatgaagaaagaccctctctcgcccgtctcctggtacttccgcaacatggtcctgcctggtgctggtctcggcctcgagggttacgtgctcttctctatcggcaacatcaagccgctgttccaatctgccttccctgattgctggaaacacgccaaaacctgcagtcaagggtggatctacgccattgactacctcgagatcatcggtatcatcgtgggtcagatcctggttggagtcttgggtgactggtaagctacaattggactcctcgtgggaaggagaccgtattaacgcacgactaggctcggccgtcgatggggtttgatccaagacgccgtgatcatgcttctcggtcttatcatgttgactgccgcctggggtgtgacccagaatggctggatcatctgttacgcttggtgtctcttcgtctacggtatcggtgttggaggcgagtatcccatgaccgccaccgccggtatggagaacgccgtcggctctggaaaggtttccaccaaagaagatcgtctgcaccgtggccgcaaggtcaccagtgccttcctgatgcagggttggggtcagttcttcaaccaggttgtgcttatcattctcctgctctgcttccaccacggcagtggtaacaacccttactccaccgtcgctgttcagtggacctaccgtgtttccttcgccattcccgccgtcggtactttgtggcttgtgtactaccgtgcctaccacatgaaggctgctagcaagcaacttactgctgccaagaagaaggcctccgtcaccggttatgatgcccagtctctgaagctgaccttcaagtacttcggattccgcatgttcgccactgctggcggctggttcgccaacgatgttttcttctacggcaacaagctcttccaaagcgagttcatcaaggttatcagtcccgaaactagctctgtcatgcctacctggctgtggaacttggtcaatgtcggcgtctctctgtgcggatactacatggcctctttcctgatcgacaacaagctgtacggtcgcaaatggatgcagatcgttggtttcatgctctgcttcgtcctcttcgtcgtccctgctttccacttcgactactaccgccgccccgagaacatcaaggccttccaggctatgtacttcctgagctctttcttcaaccagttcggtcccaattccgtctccttccttgtcgctgccgaggtcttccccacacccattcgtgcctccgcccacggtatgtccgctgcctggggtaaggccggtgcccttctggccgccgtcctgtacaactacatcgatacccagaccaagttctacgtcgtgccctggtttggtctcggtggtgctctgatcaccgcgctgttccttcccgataccaccggtctggacctgaaggagcaggagcgccgctggcaatgtctccgcgagggtcgcgagcatgagtaccacggtcctgccgtgcaccccaagcacctgtcatggtacgagcgctacgtcctgcgcaagtcccgctactacgatgccgaacttgactaccaacagaaggtcaaggagtaccgcgtcgagtgggagaccgccatggctgccaaggtcgccgagaagcaggcccacgagcatgacactgatgaatcgcttctcgagggccacgtgcacacatacttccaccgcactagccctatgttcaagggcatggagaagaatgtgtcttccaaacaggataccttcgccttgcctcccgctgcggagagtgagtcctcggatgcttccacctatgagaagcattcatgagaagcattaagcggctagtttgctcggtcctcaggttattgcctgtgatgtgaccatgatacctttttctttctaaagctagctatgataattccccctttttcaaaatttcaattttttctcaaagaaccatgcatatacaccaagtcgctttttacctttatgctcgctatatgaattgcatgacttttgcttgacgcaagcgagacattcgattatttagatatttataccacttttggacttattgctgtacatcttatttttgaagaccgttcattgtagtcaacaatcttggagagatgcctgaggcagagtggctgactaacatcatattctcctccacctgagacatcgatggatgtatatgaaccgaaccgcacacttaattaaatccgatgataccctaaacataaaacccaaagagaaaagaagagaaaagaaaagaaagaaccatgagactcttcgccttcggctctaatggatcaggccaactaggcatcggccacgaagaagacgtctccacaccaacgcaatgtctcttcgagcagccagagccaccacaaaacaccaatctccccgatggatcagaaatcatcaccatcgcagcaggcggaaaccacaccctgctcctaacaaccaacggctccatctacgccgccggctgcaacgcagacggacggtgcgggccgcacaaagcaaccaaaaacccgaaagagcccgagtccgacaacaatggaaacatcctgcgcttccgtcaactgatcatcccagacgcagtctccgacacagaagtatccaagtttaaacatgtttccgcgacgtgggagggcacgattgctgtagcgtccatgccacgacgcggcagcaataacaataacaataactataacgtcatctacggccgcaatccaaatccagatacagaagatcgagtctttgtatttggctcctcgcccaaaggggaactgggtgttggtccagacacccccgccccagtcccaggtatctgtatcccctcgttcccaccagcggggttgaggatcacagcgctggcgagcgggatggcgcattcggcagctgtgctctcgaatggggatgtttatggctggggcgcggcgcggaagggccagcttggggaggagaaccgcggggctaggattgcttattcgcctgtgaggatttgcgtgccgttttttgcggaggctgttgcttgtgggagggagtttacggttgtttcggggcgcgggcggttcgttgttcttggggatagggagaatcggtggggggtattgcggattccggaaagtttgtctttgcgtgtggatggaggtttgggggatcatttacggggtgaggatgaggaagggcattgtgaaggtgctattcgttatcgatatactggtattgcggctagttggcatggggtttatgtacatgctgcgcctgggctgggacggatggaaccgtcgataacggacggggcgttatgcaccaagtctcgatttgattctgattctgattctgtctctgtcggtggttccatcgttgcttgggggcgcaatgatcgaggtcaacttccgcccccggatcttccgactcctgttagactcgctgttggtagtgagcatgtccttgctctcctaggagatggtcgagtggcggcgtttggatggggtgagcatgggaactgtggacccgatacagattcacaagggaatgtgtcggggacatataatgtgattccgctccccgaagccgtaggagtggatgggaaggttgtcggagttggagcgggatgtgcaactagctggattattgtgacatgatcgccggaatttgggagcgtcaaaggttgttgacaactgcactgcccctgacagggtgtgtgtgctcagtcgaagaaaccatattggcgaacctatcaactatcagcatacgcctatcaaagtgtcgcaagagccagaattcacatacctgagaaaaacgttgtgttggcgggagacccgtctcatcgtttggctcatcctctctcaacaaggcaggctccgcatcgcgaatagttgccccgaatgcgtcctgcgcgtttgtttagccacccactatacccactggggaagaaagaaaaccacatacctgtgttcccgacgcatcccatccaagaatatcctgcggctcctcttcgtccttcatctcatcccactgccggtcatcatcagcaggcacgaaaaggctatcgaattccatcgaaagcccagacgccgccggccgatctgcgctagccctctggctcagattctcctgcgtagacgacccattgagaggacggatggatctggttcgcggtggcggtgggggcatttgcgtatttgtcgtcaccgatgggcgagtatcacgcgacctgctcgctgagattgggataggcacgggcgtttgccgtgggattgacgctcgtgttgacgtcggggcgtcttcgctatctgcctggccgcgggtcatgactgtgaattctgcgttgatgccttcaaatccgtactccagctgcagaggcttgcagggtcgggtgtaccgtgctgttacgctggcgtttgccgtttcggcgtgcgcaactacggctttgaagtctttcaggttgatcgcgacgtgcatattctcttcgaccaagtactcttggaagtcgcgcgtgtctgctgctacggatgtgtggactgggtgttttagtacttctgtttgggttgttagttaaaaccgctaagatttgatggaggcgaactcgacatacccttgccttcggtgatctttgttgtgaagctcgtgaacaccgctctgccggaatcggagtacatgtccagctgctcggcagataagctgaagtgctcaatgagctgcttgaggaaccgtggatcagctgtccacatgctggtaactctggatttgtcgaagatggcatgctgaattgccgctggttcgtaagtcaatttatatgacttgatcacgcctagataaattgtcagagatgtgcagtgaagccaaaagatggatatatgcaagggtatcttacctagtccacagatcattttcactgtcagtctacactcggcttgctgtagatcttcatgcaattccatgtcacagcgttcaacggctgtgtccttgtttctgtcagttttcccacgaaatatggagagaagtgcctgtattctatatcagcataaagtaaggaagataaccacggtaaatatgcggtatggtacagctccaaggataaaaaagtctatactcactttgttatagatctggcagaagaatcggtccagcgaaacactgccacttctgccattactgctggaattgaaagaatacgcctcaaagaatacccccttctcgaacgcgaaggaggcaaaccccgtcttggtagaattgagcgcactgaggcggagctggagcacggttagccagaacatttcatctgctggcttctaaaccttgaactgaactaaacaccccaagttaagaaagataacttacgatatcaggctctgcttcgatggcgactgtttcgctgaatttggacaggcatattaaggcgtcgtggagccggaccaaggctaacgggcctaacgacaatgagagcgacgtcatggctgcgcctcttggtggctatcaaatgtgttcagcctagaaatgatgtgtagatatcaatttacgtatcgcatggcgctcatggcgcgctgttggctgttcgagattcgatcgagtgagaagacgcggacaaacacatgcggcatagcgcgcaggctcgttttggcctgattgaagcctgaatgtctgaaatttggcctgaatttagaccgcctttaggcaaacgaccctgcccaggtgcgcgctagggattacataagcttgtacagaaatattgccggagttcaccgccatttaaattctgccagctcactatgactacaagtatcagagatgtgcagtcaacacagaaaagacagatctatgcaagggtatattacctagtctacagataatcttcacagtcagtctgtgaggtgccagatccatcttgaagaagaaaaaggagttcattcgactaaataactaagatggagaaagaaaaagaactaagttgcaaagtggaagcagccagttgatatcagctggccacttcataaacgttgcaaacaaccagccttctcgctcagtgatctaacaaacaatctagtttactatagaatgcgaacaagcgagcaagcaaatatgaagcatatgatatctatccttgatcgtgacatttgagatataaatgtaacacatgtcgaatttactatgcgtttagagctggaccacttatgtgaaatacgttagctaggtatgagaaataggcagataagagaaaagccgcacaactagtggctactagaattatgttgtatgtcaatgtctctttgagattaactagaagaacgaatataaaccaacggaaacttgcaataatcgtatctcaacataaaacatagattcatatagacatttaagagggaccaacaagggactctagtctactatagacagaaccatgaagtaattacattggagcgaggcattgcatcgcctgaaaagcaaatactgtagcagcttgctttccgaatcataaatgataagagccctataaaagaattttagcgtcgttctctgtaaaaatgaaataagaaatcccaatgaaactaaccttttgtcccaccatcgattggatcgttataactagagcttaggtgtgataaattgcccaagtcatcggggtgttgcccgtcgctttagtcggggtctgacaagacattgtacccttcgcaccaatttttcctttccacttgaacttggcgatagaagagttgatgatgtaaataatgtcctgattgccaacataggcaatattcaagacctggccgccttgaataccaaaagcacaggtgccatactgagccagctgatgctgcctgcccacggcagggactgtccaggtaccaccgccagcaatatttttgacaagtacctggcagtcagctacgaggggagaatcaccactgctttgattgatgaaggttgaggatccgcagtcgttaatggaagctcgtgcttccaagcggggttctttgggggccaatggagcagcttggacaaagaccaggagggtaacaaaagttatagaggtgggaatcttcatggtgaaggagaaaagtgttgcaaaataagttccaaaaggctgttaaggaagagaacgttttctgacatggaggaaattttcataggttatagcaggattctgaagcccttttatatccattaattctctgcccattaatacgttcatgtcgccgaggattttagtaaatgagttgacgtgagagttgcttccgatttggagaaagcgccaacgcgaagtatccagactaatggtatagtagccatttgacaagtatgctgtggagcactgctagcatcaccattgcaaatattttagaatattgattttaagttagcaagattgacctcattacgacctctttctatcactattagatgtccccgaagccccaaaggcagcaagagggtcagaactcaacaagaaccatgaggttattcgacgctttattgcgtgcacttcaatataattcaaattaaggatgtggtgggactgagtcagaggtggattgaagtattgagccacgaatatacctaggatgataaagatccctgcattatgaatgagcttatattccagcctatccataattagtgaaggggagctgtaattcctccgtgaggctgtccatactagactcccttatttgtccccctcatatgtctatatggataggtacacgcgtaattaagaagtcttctagtaaagacacttttcaaattgtaggatctatagtgagtggtattggaaccgggctaatcgctctcggttgatttaacggtcaagcggtgactgtacatgacagatatggagaccatactataacgcatatatggggccaactagatcacagtttgtgacttggacacacatcagatacatattagaggtatatcaaagtctcataccccatataggtccgctctctgtaggcagtactcccgaggcacatgactagtagccgtagttttctacaacatagtctaacaagagtagggatttggtatctgccaaaggccatggatctaggacggctgctccgtagaatgtgggcactctgtggctcctaaccttccctgatattaactcaattatgagtcctaagttgttctttgcacgtttccctaagaaggatgcggtcatgtcaatgtccgctaaccccacagtgtacgggatagctgtaaatctcaataaacgttcggaaaaaatccgagctcgagtattgtaagccaaactagtattcctggggagggataacatgtgatggtgtcagagcgtttgctaatgtaccagcgtgtactagtgtgcaactatgctctttcgtttcgttttcatcgcagcccttgctaagctaacgctaaatcgtgtctccgtcagtaggtctattctcaaaatattgaactaggatgagggtagttttgagaaatataacctgccctggaaaagcttcgagccgcgcgaaaacccacttatggcactattatagctcttcttttagtccccaaatatccaggttgcagcttggagagactcgtaatgaaagtggcggtggctattttggaaaaaaggaagcatagccaattaggaagaagagacatattttatatgcaacataccacctttatttgagtgtaattgcgaaaagcgggcggtatgcgacagaagaactatatttttaacgatagactccatagcgcggcctgcccctaaccaaatgtgtaagtccagaatcagtacagaatactgctaccaggcctcaatattgagctagttagcgtaggctactttgtacacatgggctgacgggcagatgtccaaatggccttagttatctgaggtagtttagtcatgcaaatagtacttctcacaataaaccatagtatattacggccaaatgtgcctgtcaggatgggcacaatagcgcatatgtagcgagaaatctgtcaatagccaaaataggcaaatcgggtagatccggagatcgcccttaaaggggattcttgaggcttaaatgcgtgaattagcaccgctgttcacaccgccctgtacgatgtattataaattttaattacaagttaaaaatatgaagctttccgtcccagaaggcttcaatgccgagaaataagggaattctaggcgttgtgtcacatttgacgcccattttcgaaggcattaatgttttcgacgatggcgttgttatggttaattcagatctttcaattttctgccgctccaaaataaggcagtcaggcatcaagcccccccattttggaccctgtggttcatctggaaagcgatgcccggcccagcccagaccgtagataccatctcttaccttagcttctgtatatacatatggcttggcccctttttttctcttttttcgccgtggctttccgattcaccggtgcccggaatttgtccatcaagatccactactccgtacttttattctgttcattgcggagcgaagcgtagcaattaaatcataacctcgtgtatgcatgtcacgtgtccagatggtttgtcctatgggctccaagatcagtagttttcatgcggtgaagaagtagctcggcgaactttggcagaataaccccaccggcagaataaatagactagagaatgaaccatcattgtcttccccagagcttctacagtcacactttgcgtagcattagaagttagaatcagtcgttttgctctgcagcgactatcgggcggccgtaggccgtccagatccctcgtattcagcactccgtagaacggattcatctacttttccagtggcgcagagatctgccttaatttccctaattgatcttagttcttagtaatcttagtaatcttagttcttaactagtaactattaaattattttggcattcctctcttttgattcatagcataccagctagatgctagatgctagatgctaggtagccaatagtgctccggggcctttactatatcaaattgaaagttaagaggcccattgtagataataaatcaatttgagtgtgtaaaaataacgaatcaagtaacacgctatttatgagctagttacaaaatctgggtggttagactgtttcttatactccgtgcgtacgggctccggagtaagtaggtttgtgttctaacttggacctttctgccttggcctaaagaggaatattcccaaaagaaaataataataataatgagaatataatttttctttcttttcaagggaaaaaaacacggtatcatggaaaatggtccagagttgttactaaagtagagaatcgaaaaaccgcagtttcaaggaccattatttgtacaccaacctataaacaatatgattctgatagtatgagcctacgtctatccccggttgtcctggctcagaaacgtagttcagaaatataagttgtgggaaatgtcgagaaaaggtaccatttgtatggcaataccatacaaaaggcaataccacaaaaggtacttattctactccgtacagatttgtaactaagctaattttttttgcattaaaccctgcggcccaactcggaaagaggtgtattgagaccgtatgtatcagttggtaggtgggcgcattgtatacattagggccaccccgtgcagtggagtctatcatttggccccgggctttgctgagatccctccaaggagatcttccaatcacactatgcttatcaacttctttctaggctggaagtatcttctgccagcgtgggacctggatcttgcttactttcattgtcgcctttcacaatgcttttgaaccgcctagttcccacttcgggactttcagcaatcagctcggtccaggtgctgcggacttttcttttctttccgttcttctatgttttactcatcatggccgcacgcagacagtcttcccgtgacccgtcctcaatatttttcgatccaacaaaggcctatgatcctgtctattcagctatcaggcttgagcaggcagcttctttcattgataaagcgaacaatgctacagagtcgcagatacaaagaggtccacggcaacctaaattttgcctgggaattgccaccattgcgcgaaagggggccagctatttccaagctactgtaggcacattccttgagggcctgagtgaggaagaaagggcagacattcacttgattctattcatcgcgcacacggatccgtcacaacatcctgcgtatacagagccgtggttgtacaaactagcggatgaagtgttgctttacaacgcctccgaaatcgacattgatcatatacgctctctagaaacaaatgaggccaaaatagcaggccgtgagaaggctctctttgactacacatatctgttaaacgcatgtgcaaacatcgacacgccgtacgtcattatgcttgaagatgatctcgttgctttagatggctggtatcatcgcactaaagctgctttgtcctctgcggaagaacagactcgagaaatgggagcggcgaattgtgagttttacagccattatggaactccttaaatttccttgctgacagttttcttacccagggctatacctgcgccttttttacaccgaagaatattttggttggaacggtgaagaatggcttacataccttttcttttccatccttgtcgtctgcttcgtggcctgcgtccccctggtcctccgacaattcaatcaccatgcccgttcctttctaccgaatatgacaataattatttggagtggtatattcacaccattgttgattgggctcttttttgccatgggccgtgtgacgatgctccctcgagcaaacggcgtgcatcaaatgcccagatttggatgttgttcgcaagcctttgtcttcccccagtcacggataccggagcttgtcgggctatacacatccaagcatatcggatacgtcgacgtgctcaccgaggaatatgcaaatgcgagaaatgagattcgctgggcagtgacgccaagcattgtacagcatgttgggcggaagagctctaagggtgttgacaacgatatctcatcacacgtcaaaatcaagtcaaaggctgagttgacagttgtagagaagctttggaatttcgagtttgagatgaacgatgcagaagctttgcgcgcggaacatgatgctgtgaagcagcgagggggttcgtaatgctcgattttccttgtacatcaactttcagataaaagctgtttttatcctcttgatcattctgtatgtgtataatctaaatcaagagatagcgctggacaaaattcgaatcgtcatcaggtcgaatacttaatatcgatctacgatagattgctatcatatgcttcatgtttgttcgtttgcttgcttgctcattgtttgcattgtttactatattagattgtttgctagatatctaagcgagaagatttgatgtttgcaacgtttgcaaagtgattagctatatcaactggctgcttcccactttacaatttgcttcttctttctttctccatcttcattatttagttgaatgtgatctttcttgtttaagatctggtgcctcaaaatgagggccaactatctttttgtattcttcaccgggtgtaagaacatcggaggcaagcaaaggcgatgacgtccccccttccgaatactattagcgaatatcaacggaaagtcaaagggccagcaaactcactttctctgcatcatcgtaacctaaccaggctcgataaatcttttcagggaattgagacccaaacatgtaagacattttcatcagaatgtcattgtgctggttccagctccagatactatcccgcccagcgctgatcttgccaggcttgcctgaattagctctgagattgagctcaatcggatttgtttcgtgcgcatggtaaatgggctgaggaacctgaactgccttcaacccataataaagagcccaggatgtgggggacatttcagatgctaatcctagacctttttcgattttatccgcatgcatcagccggagtaatcgggccgagacgcgggacatagcgacaactgatgcccggcgcggagtacgtcccttttgacgaaagttatatacccggtcagcaaagggccagtcggtatgctgagggtcaaattgaggcagccaggtgatcacgtcggcttcctcacctacgccccagctccaaaaatcatcatcattcgagtctgagttgaagtccgagtgcaccggctcaggtgcttcatttccaacctcgataccttgtgcaggccgtgatccccagatactatcaagacctatcatgctctggtctacctgatcgatgaagttatcccagctcccgtggacagcaggtatataaaagtatgagttacgctcccacagattcttacgaggctgttgtcttgcaaaatctgctgcctgctcgagaaagttatagaaatgtccggtataacgcgaatccatttcaaactgccagaagaagtcgtactgtggattcacccgcgagaaaatctgcattggctgaaagtattgaagtatggccctagaaattattaacatttcgaaattcgcctgaagcagtatagaagagagctagaatgcgatcttactcgtgaacgtcgatcttcgggtaccagtctcttagtatctctgcgttgaaaaatactgccaaatcctggagctcccgcggaagcgactttttcagactgtccaagcctaccgtatcggctgggtgaggcaaatcaatatcttttgcatcaaccaaaaggacaacctcatattctgcaccggataagagtgatagctccattatcatcgaccggatataataaaaatcatcttccgtgtattccctgccgagccatgtacgcaggactaccgcggtgcgtgatttgagaatagcagaggcattgtttcgatctgtccgcatcttctctccgctccagcgatgttcatctgtttttttatcatgctccttgtggagagtccacatcttctcgccaattttcgaaggttgataacggttttcattgcgatgcaagcagtcttgttgcaaagtggcccagttcacatcctgccacttcacattgttgcctttgttgtcttcgtctgcttcgtctgtttcgtctgcatagccgtatggcgcataccgagaatatcggtcggtgcagagactccgatcaagcttccacgcctcgtacgatccaaacataggcatcggaaaacctagcatgctatcagtgctcgctgcactactgtatgccaccataggcttgtcctcattccatacctgactggttccaacgaaaccctttcatagctgtttccgcattcctacgatccaggactagaccatttggaccaacacactgctggtaagatcctttccacgtgtcgttccatgtagtgctgttatattcgggatatggatcgtaaggtatgggtagtggctcctgcgaagtttccaaaacaagctgaccgaggtcattcccatcaccagcagcgccagatcctaaataaaaggcatttcttctactacaaagagatgggtatgttagcgattgcacgaagactgccatatgaagcgaggcctggatgtctccagaagccctattagtctagatggtcaagtataccttgaagcatagactgttgggctgcgctgtgctgtagtagcttgctctcttggccaacgtaaaagtacgaaaattgtcaatgcaaagctaaacgcaatcgcaataagactgcgtttgagggaagtgcgccataaatgtcggcatcttagcacgaggtagtcaacgatgtgcattcttgagatagaccatatgatctaaacagtgttcgtatgcatggtgagaggaaaaggagaatgcacaaacacaaattatggccgtaccatgggcatatatcccattggcccccaatattgggagcctacagaattccgaagttcttccgggggtccgcagttcaccccgtggccccatggatggatgtgtccggagtacctgatacgtaagtggtaccacgtagtaatttacatgccagcgggtacctagacggcgccttacccgatatagtctaaaatagtgtccagacagtacccggttctcgccaagcaacccaatccctatatctctacgatcactcaaataggaaaaatctcactaattagtatggcctgtttcttcattacaatattctatcttctgtggtatactttaatcgaaattgattaaagctctctactggaaaaactagcctgtacaaaatatacaattcgagaattcggcccccatattacttaaacaggttagcttagtactaatcaacgtcgtaactaatccaacggtaaacgaactgcggtcgacccacccaaaacgcgccataaattaacgcttacttaattcaaccaattcgctcccaatcatctacaaagttagtagagaaagagggtgggatcttagtacctatccaggcctttaaatctcttcaattcgtggattagcccgcaccttcaacgtcgtacacgcctacgtggtattcactaacgcgtgacttcacatctgcaaactgctatacattgactgaaacgggagaggaattacttcaaaaatgggtagtactctctgtggatctacgtgcagccggccttccggcattcttcggtacgaagtcttctctaacactaacaattaccatccgtgggctaagatgcgaaagtctaaactttcgagcgggtcggcccgatccatccgtgttcattccaagcttgttgctatgtaacccatcccataagaatgaaaggtgtaaccggtaagaaccgtagcctaggggtttcatggagtcgtatatccatatgttaaacaggcgctgatgtcaaaaagcttggggtgcaagaagacatggatatgaatatatccagccccaattaaggcttttatgtacagtcttggataaaatgccagatgataaatgaaaaagaaaacataaaacataaatatcgtaaataaaagagggtatattgcttgcgatgtaccaaataagttttcgtaccaagttgggaatgctagatatcaaataagtcggatccccctatccaacactaggggcgtttcctgtgacggggcgtccctccgcatcatctcgtgcaccttcctctctagcattcgtattgatcccaggatctgtattgaaggcacggtcttgctcctgatcccgctggggcaagggctgcggaaactgcatttccataaaccgtcgtctgcgtctgccggctcgaacagcatgcaggaagttaaccccaacctgggcgaagaagatggccaggaaggcgccaatcacgaatccctgggagacatacgtttcgtctttttgcttctgttggccactgtcgctggtttgatcacgttcgttgggtatttgcgagctaagaccggggaacgaaaatttggagctaccaaacgagacggagacagagaaagagtacattgtcaatgacgtgaatacttgcggcgatatcgacgtgaaaaatcccgacaatggccgcaatgctaaagggatgatgcagaagatgaggagagggacggatagtcataagacagagtagagtgatgagcgagtagacctaatcggaaatatcagcatagcatctaatggggagaagagatgttgaacctaccagtctcgagcctcaagttgtctcgcccattttgctgagagtttcagtctctctcgaacacttgtggcggcgagtaagggatatttctcttcttcggagatgggcaaaatgcttgcgaaccaccatgggaagcgggctgcatctgtagggatgggtccatatgctagcatgacgcgcgggtgcagccaaggagccccagatctgcgctggttggtgatatactctcttgctgagaggagtagctgttgagttggcattgagcctaacggaggatcagcttcattcccttctgacagagcatttacaccgcctgttgaggtctccaacgactcaagtcgctcctcctctgcgagcgagatgtcatctacgcgctctgttttggcaacataatagccatccagcattcccgagtcgacgatcttgaaccgcgatacgcctgtagccaccacgagactgcgaccatctggaagcagctcatatcgctcgatcatcaatagcgttccgtattgcataaacggtgcgtcatgtaattgacctggctgtacccggccttgccggttgtgcatgaccatgccgaactttccatttccacttgcgagaacccgctgaatcataagtcgatatctgggctcgaagacatggagaaaagtgggcattgtcgggaaagatagcgtgcacacaaaaagtggcaagctcttcgcgtaatccgcgcctgtctcatcctgggcgctggtctcccgtctgactgagatctggtcggggaaaaagtattcgaccaaccgtgccacaggctggtttatgggctctgactgtagatcattcggaatgcctagctttcggcgacaaatgggacacagatctgtatggtttaagacccgcgcgacacattttcggcaaaaagtgtgaccacaaggcgtcgtcatcggatctaaaaggagtgcatagcaaacctgacagtctaactcggcgcagagactgtctcgcagcttttggaagtgaatgagatcctgaacttctgagcttccggctggcgttgtggaatctccatagatgacttcgcatgcatcagacgggaaccggccttccagtgccaggctatagattcccctcaaccacccatgtcgcttcaaatgcccacttccgttcttattccgcccgtcggttttccagcgcagtaacggtccgtcatcctcggacgagtccagaggcacgttgtctgcctccgaccccagtatttctccaaaaaggccaaccagcttcccaagcagcacatcagcgccacaatctgcaacacaatggcccccaccacacgtcttatttcctttccaaaggcatgtgaattcctgattcctcccctcagtcacggggtacgtaatacctgtccggggccgaagggcgggcaaacattcccgacagatcgaattcccgcatggtaggcggagcggagttcggaaagggcgggagcaatgttggcactggatcaattggatcacgatatgaggtagatctgccgtatcgctaggtgtatgttcttccgagcttgaaacatctgagcttgagtcctccgggctctccattacggtcgggataggttcagcgtcggtcatttgtgtcaggctcagggactcggctgcatcttccattacactgcagtccacgggtacaaatgcagtgaataagagggaaacgtagaaggataaatgatgaagctcggggggtgggggatccgctatctgcaggtgctcaggtgtgggtcaactttagataatcggatcagtgaccatcccgaggtccggtgtcgcagtacatcgtttatagtagtggttatacaaagaaataatattaattgcgtaacgaaacgaagcaaagcaagtataaatcaaaaggtcttacgtacgtgtcacgtggccaagtttctcccagggctgaaataatagcgttctaatgggccatcatgtgatcatcagtcgcttcgctctgcaaccatccatggatgtcattctcaatgatataggctgtaaatgcatccgacttattcttatactaattatgcggaataaaactgatgatgctgctaagcagtgagcactcaatcggcaaccaaataattatgcattttccaaacgcccaacaagtctccgcgcgatgaaaagaatccgacggcgtccatcccacaaaggatataatccaaccgtcagcaaagtgatccagagccaaatttcagcaaccacaacccaggcgatgaagaactaaatcttgtcagtgacattgtccacccttgagaaaatatagtgcacttactcctctgctgaatataaacctagcaccatacatcggaagtggccagagaacccagtggccgaagaaagtagcaacggcccaaaataacgcgtatcgtgaccatctcctttggcttgactcggaaagctggcccgtttcatttctctctttagtaacctcggtaacttcaccctcagaatggatagccaggtcgttattgctcatcgacttccagtcgaagtcttccggtgcaatcaatgtaatcaacacggagtatagtaacgggctaactgcagatgccactgtgccgtacatgcatggcaatgtctgtccagttgaagagactgtaacggcaccatagaaatgatgcgctgttccgagccagacagcgaggcccgtggctagaccgagatacgccgacgcaatgaccgcgatccggctttgctttctccaaagaatcgacagtatcaggggaaatatcccggggcaggtgatcactccttcgagttatgttagaaacatcgagtatatccttgatataagtacctgagcttaccaatcatgtgaagggtccagcccatgtcaatgccaacatagtggaacattgcagtgaggcctgccgcgacaaggccgaatataatcactcccacccgactccagaagattatctcttgattgtttgcattcttgttgaagtaggtgcggtagccatcaaaggccacaatcgaagagacagcaatgacctgtgctgacagtgtagacgtaacagccataaaagtcatcaggagagtagccactgcgccacctttgcccgctaccgcgatggctgcgtaaggcaaagctagtccattcgtgacttcagtactagtcatgggctcgaaatatcttagcttcaagatcaaatatcgagaatcgatggcctggacttactctcggatatgttgggaaggcctttgtgctctccaatcccaacgcaaccatccccataatagttccaagagcccaaggaatactgaaataagataaacccccaatcacgtatccaggaacgacaccttctggggacgcagcaaatgccttagtgaagtatccggtatccatctattcccaattagcaccaagccgtcagtaattcggggaggcacttacaatgacagctccgaagtttgacaccaaaagaatgattccaaaaaaaattccctgttgagatgtcatggtaaaaagcgagccttggtaatttccatccacgagatgatttggctgagctgcaatgacaagatcatacaaacccccaatcgacttgacctccacgctggtcaacgctttggtggtcaaataacaacacagaatcaaaataatgaaagtgtgaatataatcagttagaaacctgcaaaccctattagtgctgtggacatattttgaaaaataatctgacatacgttgctttgatacctccagtgagggtataaatgaccacaccaactggcagcaggaaagtggatgccatgatgtgcatcccagttctttcatggtaagccgattgaccacaagtgttttcgagcgcggttaccggacttacaaatatgtaatggcgactgaagcacctaaaatcatgttgatggtgttaaagagattattcaccacagccagaaaggtgaagcttaagtgagcgacagtgccttgaaattgttagttttcatgtttcactgacagacacgtaaagtcctcaccatatcgcatcttgatgatttccagaacagtgtgcgcgctgggcacacgctttttacagacagtgccgagatacgcaaaacagacgatcataggtgagcatccagcaccataccaaaatgggccacttacgccgtattgataggccaccaatacggcactcagcaatgcagtgctccaaagccaggactattgtaggttagcactgaatattgttaagcatttgttcacatacagatacaactgccgaggcaactaaacccgtgctgactctccgattggcaacaataaatctagttgggattaaaaaggagtcagatgagaagcttggggaaaaacatacgtttcagcattcgaattatcttcgcccactgtacttttcaatgccttggtgacaaatatcattccttcattattcttagcatagtcataagaagagttgtgtatttacgtcctacctgctgcaaatgacaacccaacaccaatcacgactccataccctacaccttgtgataacgggggagatatgtcggacatggctcttgaaaccacaagctgaaatggggtagaactgagcggaacaataatacctggcaattgaagccatcgtgagatttatatggggtctaggaaatgtcggctgagttcaccttaatctcaagctccaaacattgttccacttgaaaggcttttctatgcaagctaaccatttcaggtaattaaaaagagaaaactcgctgctctagagccaaatgtgagcaatatgacgtgctcggcgtgcttcatggcggagcttttcagcaccgcaaataaccagggaaaatgatgcaatccggcaatttggggtcaatttggggtcaatttgtcagtgaaatatggatagttaccagtgcctggataaacatagaaaggtcctctatatggtctagactattagctacaaaaccgagaagggggaggaatatgtacatctgaaaagacggccgaaaagaataccgcaaaagacaacgaggcatacggagtaggaggccgactattcttgtagtcaactattgagatttgaaatggagttatgtaattgagaaacgtgtgtacggagtagttaggggattccttggtcaatgtgctatggagcgttatggtgtcatagtatgcccaaattactatacaaaacatatggagcgagcaagagaagaagagagagaaactcgggatcgaggaattcatgtgaccaatcttgcaattaatcaattctcagctcccgagagagccgacttcaacctccgtaattggagttgttggcgcgtgcagaagcatgttctagatctattagcgcagctcattgtatggttattctcgggcagactgattgctccctatacaaaagcatttctaatcttaggccgactccatacgtttctctgaacataaagaagaatcaaacggaaacaaaaacacatgcatccagtatcagtcgttgggtgatggtgtcggtcctgaacgtttaatgatctttctgatcgaggctaccgtagtcaaaacgacggctgacctgtgcatgctgcttggtagggtaaggtgttgataccaactaacatcccatcaatcactgctctagccgacagcacgtatgcgacgatgaagcgcaaactgacgatttccttggtatttctccctcccacaacctgagccatatcaggaacgctatgacaccctcgatatctgagatgaaagttgcttaggattactaaaatgtaagcgttgagcgatccaccgaccgctcccagggtgtacatggcagttggaatggataaaacacccacggcgaacaaaatcttgatgaagatctctgaagtctttattcagcggacggtgtgatacttgattccatattctgtgtcgattaatacctcactctgttgaggtagcttccttgctcgggagtcggtgtcgggactcggtgctcgctctatatcggtcggtttgatatcggagttcctcggatgttgggtatctgtgatcgttgcctatttggaaatgtaactgaaacaatatgtaactagttacgattgattattctgttgattaaacggtaaaccacgctgtaactagttaactgtaataggaaggagcttgacagttaccccgggttacgaaggcccatagcgctcagggttcaaacccccctattctagagcggcagaagatttcaatacctgaattgccattacttatgtcttactaatcaaagcacgggatgttaagcccaaaggcttcatattttgaacttgtaattaataaatttacaatacactgtatagagcggtgtggagagcggtgccaagggttttgaagctgtaccgggtagattgccgtcggcgaagtcaagggaatacggagtagataagcatgcatgatcgatgcattatccatccactactcatgcattgacatatgcgggaaaaatgtggctacaggattcgcttaaagagaacaatcaagctgtaagtccgagacaggacagggcaatatgtaaatacggggtttgtccacaatggagaggagagcgttatcggtggccgacggccgttgaacccccaatatcgaaggtaggacggccgacggcgatggattcccccaacggggaccatttatatactcttggttagcaagaccctgtgaacaatttaaatagactctcgtctgaccaattcaactactctaaccgcattcctcattcctcaacacctgctccgtgttgttacacactgatatttatacacgaaaatatggcatcatcacaactttctcctttcaaggtgaaccagacacgactgcttgagtcgctacacacaagctgtcaacatggctctgcgcatccgtatggaaagtaaggtactcactctccggctttcgacctatgctgattgtgttgttatcagtgactccacggaaactggaatggctaggctcagtctaacggactcggataaagacgtaagggaatggtttattgagtctgcaaaagccattgggtgtcatacctacgtcgaccaaatgggcaatctctttgcgatccgtcccggaaagaataaagatgcccctcccatcatgatgggttcccatctagacacgcagcccactggaggacgatacgatggtatcctcggtgttgtcgccggcttagaagtactgaaagtactagaagagaactcgttcgagacagaaggaagcattggagttgttgactggactaagtatgtttcctccgataacatactgaacacttggctaataccgtacccaacagtgaagaaggagcacgtttcccggtgatggctatctcagctgctgtctgggccgaggcaattcctctcactacggcttggaatctgaaggaaatttccgctggtgataacacaacccgcaagaccatgaaagaggaactcaatagaataggttatgtgggagaaacgccagcttcattcaaggccaatccttttgctgcccacttcgagctccacattgagcaagggccaatattggaagacgaaggccgaaagatcggtgttgtgcaaggtcagaagctctcgactgattggcgattaaaattgaccattccaaggtgttcaagcgtttaaatggttcgatataactgtcagtggcagggatagccacgcaggcacgactcctctgtatgcgcgtaaagatgccatgctatgcgccgccaaaatgatcaccacagcgaactcgatcgcaaagaaggccaacggtctcgctacgacgggcatcatacactctgagccagggactgtcaacactgtagctcaaacaatcaattttagtctcgacctccgccatacatttgacgaagatctcgaaaatatgattgcagactgcatggctgaattcaagagaatagcaaccgatgatagcgagcgaggctgcaccgtcgaatggaaggaactggtcgatagtcccgctgttcattttgacaaggattgcatctccatggttgaagaaagcgccaaaactgttcttgcagatgtccctgatccaatttccgggggaaagcagtggcgggatatgatcagtggtgccggtcacgatagctgctacacaaatcggcggtgcccaacgagcatgatcttcacaccgactcggaatgggattagccacaaccccgtggagtattgttctcctgaagactggtaagttgtagccctggaaaaatctgcttatgatcatggctgactagtccagtgctcttggtgccaacgtcttgttaggcgctgttttaggatatgacaagctccgcgcgaaacgaggcgactttgcgtaagacaggaaagtgaacaaatgtctcaaatatctatcaagaatcaagcacacgatgaacgagacagaagctacataaataaatcaaagaccttgtgaaaaggagtaaagaatggttgacatatagtgtagcagcatgatgcttgaccaggcacgagcttttaaataatgttgcagctcgagttaaagggaaaatgtagcgaattcattggcaagagggctacacttattcaaggattcaaatagtctacttccttcgagttttagggcaaagtaagacgaggatgtgaaaaccggcttaagagttttccgcccccggttgtccaccaatcggcttcttcttatcaatcccctccctcacggtcaattctcgaactcacgatactatcgaggtaaaatgagcaaagataggagtgaaaccgctttcaatctcgataagagtaccccgacaattgaccgtgtcacgaacgcacgaaagtatcgctccaaagtacagaggccatgcgatttgtgtcggtctcgcaaagttcattgcaatatcccctacccatctcagccatgtacactctgcgagcgtaccaggcgatcttgcacatttgtggaaaagaccaaccgtaaacccagcaagaaaaaaaccaaggatttcggcttatcacaatcccctcgatctgacggtcgctttggatctactgcaggtgacctagtcccatgtacgactgttgctggtgcagagacaacatctttcgttgtttccccatctcagagtgatggaagtcaatctcaacgacccctcggcacaggtagtgaactaagctccacaaaaaagctttgctaatagctcagtgcagatgatcattttttatccgacatctctggtatgcctaacgaatcactgctagacaatcccctgatcggaactggctggcctcgcgatgatggcgttgactggcccacgttcaacaatgaagatttccagggcatgcttgacaccttgggacgagaaaccatttcggaactactgcctattgatggtttcagtactgctgataacagtccatcaaggtcacattctagccagcctggaggctcggaagagttgaccatcgatcagaaacctgacttctcatctcaaatttttggattttcgggcgagtctgacccattcctcctgcgaaattacccgtacgacgattcaggcgaagtgaagttcttcaggcttatttatagaatggcatcaaatacggccgctagtcccgagtccgaccatacggttcctcctgatggccaccagaggagaagctcggctggagacgtgcctgtttattttctgcagaaccatagccaaaccgtatctcagtccttgcaggcggtcgaaaagtgcatgttcgaacaaggcaagcacgcaccgagaatccaactcgacagtctcgtgagtccagagatgggagtgggactagtgaagctgtatataccatgtgctctcaataccggattcccttgctaatgttcgaaggtattttcggtacatcttccatgccctcccggttctttctcgatccttcgtctttcgagacatcaaattcttcgtgaaaaacgcctcggtcgggcttcttgccgccatatacgcactttcactacaatttactgcatgggacgatgttctttgcgttgacaacggatataccaaaccgtcttcggaagacttatggcgcatcgcgtatgcctgtgtgcagaaggagatgcacttcccacggctatcaacaatccagacttctcttttactcctcaacttcgacccttttgatccagcttccgcagagaatccttcggcgtgggctttggctagctcaacgctagctattgctcagtccttgggattgaatatagaccctataggctgggatttaccaacctgggagattcgtcttcggcgacgtctgtggtggtgtgttcttgttgaacacagttggcgagccgtcactcatggacggcagtctatactttcctacgatagttggaatgtgactcctcttactttggccgactttgaggtcaacctgaatcctgaagctgggcttgaggtggatgatggttgtccggattactttatgcatcttagttcactcacgcttattgccaacgatttatgtcggaccttcttgtgagttcaaactcgttctgactttccccttcttagccactcttgtcgcgttccatagccgtctttatcaaagacatccctgagttcgcctatattcactaaccgcaccaccagctctctccgctctgtctgccaacaacggtctttggatagcttgatagatcaggctcgagtgtttcgtcaacaactacatcagtggatcagcgcactgccagagtcgctgcaaatgccagcaccagcacagacacactcagaaaccgaggaagaaccagtcgatactcgcggtagtttgcacatctcatacttcacagttcaaatactgcttttccgtgcccttttacggccaatactcgacgacaaaatagggctggatcaccttcagccctccgttgcagccatcctagacgcgtcgcgtggattgattcgcgctgtgactcgtttagtttacagcctcggtgcccgacatcaatcagccttctggccgacttatacgagatcatgcttttcttatccggggcaattcagtttcatgctgtgtttccaacatagagagccgcatatgatgcttaatgaccagaagctcttgggtatttggagacaaacattgcgtacccgcgctccgtcttggccgcttcttcgctttgcggctattcgtgttgatggcatcttttggaaaaacttggtcaatgtcgcggcagcttcccatgccgttgatacctcaatatgagcccttttaagtgaaggtcgctagtaaaaatcaccgatccttcaagatcttcgccaaaggctccttcggaataccatgcggtgattttattttacccctgaaatcggcacaatgacggtccatggcttgattgaggcctgggatcttcaccgacagtccaatcacataatcaagccaagaaaaagaacggtctttgaacctcaggcttggcattttaccttcagtctggatgcaagagaaattgtactgtccaaatgtgtctggattcaagtggcccaataagatgggggatcctttccttgggccgtcaaaatatgttcatgtctatctactaaacccaagcggtctcaacgtcccaagacccctcactcctactgcccgccatcatactctctgtgcgatgcaaaaactgcccaaagcctcgagaacctacaacccctccatcttcccggtcccaaactatatggccacgaagcacagtgtagcgcggccactgctttaccttgtgcccctcgaatggagtgtagtcgacattgtgatgaaggatgtcgttggtgacagtcatcgcaagactcccctcggggtaccagatcacaaagtcggcatcactaacctccgggataagtgcaccttttctcgggtacatgccatacaatttagctgggttggttgatgtcagctccacgtatttctgtatattgagtcgatcggccgaaagaaccaatggcattcgggtctcgacaccagagaatccgttcggaatcaggtgaaactgtccatcgggacgttccgtagtcacgcttgatcctttgccagacgtcgagtcgttgaagttaaacgggctgtgatcggatgagagaatggtaaatgttccgtcctcgagaccggcccaaatagcctcatggtcggatttgttgcgcagcggcggactgcaaacacattttgcaccctcgagcccaggccgatccaggttctcgctgctgaggaacagatattggggacaagtctcggcatagattggaagaccctttgcctgagcttgtcgaatgttatcgacggctcgaggattagatacatgtacgattaagatcggagtatcaataaattcagagagacagattgcacggtagcttgcctcgatctcagcgacggcagggtgagaagccgtatggtactttggtgcgtatagttggcgctcgtgcaatttcttggtcatccacgcaatcacagagtcgttctcggcatgcaccatagtcgtgaccttgtgtagacgggattgaaacaagacatccaagaattgctcgtcgttgaggcgcaaagcttcgtacgtcatgtatatcttgacggacgagatgcccaagtctcggaaggctggaaattccgcaagcgtctttgcgcatgggttggatatgatgagatggaacgagtaatcgctgtagcattgatcctgggcacgttcgtgagcgcaagctagggttgcgagaacactgtcttcatgcttccgttgaggtgcgaaggccacgatggtggttgtacctcccgcaatcgcggcgcgggtgcctaggaatttcagtcaattcaatgcaacatgttagtcgccagctctgaatactagggggctcaccggactcgaaattgtctgcagtcgaaccgagtccaaatagaggcggctcctggaggtgaacatgggcatcaatccctcccggcttgaaagaggtcagcacgtggccatgagttcattcatgatagaggtaaaaaaaaaaccaaccgtaacaagagctcccttggcgtcaatgatctttttggcctttgagccagccaatgatccttgggggacaattgagtgaatcttctcgtctttgacgccaatgtcacattgcacgacatcttcaaccgttgccaaagtacagttcagcacaatgaggtccagatcaggattcaattgttcggacatattgggagataaataaataaagaatccgtcttaaatgaaacttacatttcggaatatcaagctgttcagaggggggttccactctcgaaccgccgtcggcgtcgttatctaaaaggcggggcatccaggtctgcccgtcggcgaacaaggcactttagatttggctcaaatccatgcatggaaatattcggcacttttataatgtcgttgagctaattggaacacctttgtcattagcagattggctgtttattggggctagccctttagaatccccgtatgcaggtttatctttgttcttctctgaccttattcgctcagctatgtctattagaagattcaactactaagttgtgatggttgacctgggaaccttgggagtattgtatgattacatagaatacatagctaataatacacatgaacgagacaccacagacgttgaaagatcattcaaaactggccaccaacggtacgcactgaaaagtcggccgccaagtgctactttcgttgtcatattgattgcttgaaaatcccaaatatagttgattcgagccgtgtggaaatggtgcgagatcttcctcggtgatccacggaggttgacactcattctgcctgaagatgccatagtcatgtatacgagcctcttcggggatgagtgctgcttgcgacctagttgcctcgactttgtgaggaagtgccactgtgttcacttgcctcagggcagggctatagccctcttccagtttcatcaatgtttccgacaaaacagccacgggagcgcatttgaaaaatccttgtatcggaggcgcttgtcgcagtagatccaaagcccttcgccgcaggcttgggtcacgacatctcaacacagtcatagcgagagggacacccacactcagctcaaaggtaaagggtggttgggcaccatttggccctactgaggtatcgagaatcaacctagactgctcgacgatagtaacgaagtctttaaagtggatatcgaaaacagtttcctgttgccttaagcatcctgtcacacaaatcaaagtagcagcatgatgcgtgagcaggataggctctgggtatatagaaacattggatactgagttttttctctcgcaagtattggtgtatgcccgatgccattgatcgagacgagctcgaagcgcttctttttttgcgaccatttctggactaacagcggaatccgcaccgactgctctgaggtgtaatttcgcctcgcgctcaaaaagagcaacttccgcagctatggcggatataatggttcttgcggaatcggcagatgcgaaaccagcgctcagatctgtttctacgaaggcgagaagttcagttggaaactgagtccctgaaatggtgagggaacttgtgcccagtcgcaggaataagggagcaatgctgcgttccaacagaacagccttactggtagatattcctccatggccgatttgggcacggaggtcaagtatcaaaatgatgccttgtcggtagagctccaaggcctgctccatatgtccttggattgtctccacacagatgaacagtgcgcagctgatgactgcaatgtacggatctgcgctgcctcgctggatctgtgaagaaacacccgagattgatcgcgtgtaccatgtcaatgcttcctgctgagcatgatcaagcaaatgtgccttgtttcggcgatctctcaaaaaatgaaagtccatgcactgctttggattttcgtacaatgcgctaattgcaatcattgcatcccacacagcgggctcactgcggcagatctgcggaacaacccccgtccagaaatctatattcattccacctgcgagatgttgggacacatgttggaagtaatattcaaatgcgcgacgttctcgtcgtcctggatttggagacgacagttcgaggctgggtgtggagggagcccagggagatacccctctgctctcatattcacacttccgtcctgtgctagagcagcgaaggcaattgggcttctcttcgccacatttgactcttcggattctggtcggcggtcagagcttaactccgaaaatggcggaggaaactcttacttgcaggttttgcatccagatcgagatttcacagcccctatacggtggctcatatctgaatcaggtgggagaaggcatagaagttcgggatcccacctacacgtaggtatggctggatgtggttcttagtccacactgtggaatactggacaggactacgggcaggacgttgaccgccctcataaagcggcagtccatcgggacggagtaaccacctcgacaggtctacagccctggtagacagatttgagcagtgctgcctccaggaagtatcgctgatactgtgtgggaaatatacgagctggatagcactggtttgctgaccaatgtcaaaattatactgatctacgccggtcaggaaatttgaggtcctatatttttaaaagtcatagattggacatgcgtaaatcgtcgctctgaatacaaaaagccaagcacccaatcagccgtcttgcagggtatatttgcaggacaggaaatttcaaatatcaaggcgtttattctgactgggaagtagtagatgagtccgattccgagtcggaatcttcatcaaggacgattcgtcgcatgacactcttgtcgaataagtccaaggcgaaacgtcgagctgggagtctataatgatgactttccagaatgcatagggtcttgcggaagagatgtgcttggtggaatcgctccggttgtttagattttaggctgtggttgagaattgtgagcaaatgtaagaagtcgcggaatgaaaactgagagccatacatgtgaagatcagaagcggctcttttggagagtaccgtgttgcccatatcgacgatcaactttaagatccgctgattgccgggatcggagtcggtggtggcttccttgagtttctccttgggagttcgcttcgatctataatcaaagccagggaaggaaatctagacggatgagtacaatgagacgaaagtgaagggacagaagatactcaccaagaataattttcggaaatcggtagggagacaaagtcccagtgaatctcccttttggtcaaccccggaatcccagcccaaaccccgcaggacttggagtccgtgtcgactgcgagatatcaagcccaaaacaaagaaagcagtgcctcgcatagtgagaactcctgcactggttgctatctgcacaatccgttggataatctcagcatccaagaatggtgcgccaagctccattgagccgatattgccgacagcccagaggcatcctttagctttgagaagcatttcgttgtcttcttcatccagcctgaaatcacgaatcgtccaagcaaattcattgaaatggcccgattgttctagtagcttacacccctcggcagttcgtgcaagttctcggtagaaatgcggtggtaccaacccaatatcctggaggtccaccagatcctcgggtacaaggcttccacggcgcggttgctcgacgtaagctcgggaaagagctgcctcaacaagaccgacatagctatcattgcggccaaggaaccagtcatccatctcttgggtgatgtaatcaagaccatccagatagtgatatcccacggaagtcgataggaatctgagaagtagcggtgcaccaatttcacctagatgatcaagagagggtcgacatttgaccacgaactccagataatcccgttgattgcatgcttcttccagaattttcacggcgacctggcagacagtgacctcgggatcatacaattgggtgacaagaagtttgaccacccattctgcattgtcaatcgccacttgaggcgaaagcgttacatccccaacagcatatttgcgtaggaatctggttgcaaatattcgaatatccttggagccaattgttaacgccttggagagcatgacgcggagatgactttcgcggctgtaatccatgtttcctagcaaagtctgaatcagatcgttgcgatcttgcaactcaatgatgtggtaaaacatgttgagcatatgccatcgttccatcatgagcagcccgttgacatcgccgctcaatgaccctagcatcgcaaagtagcctccactgagagtattggccatctggtctttggagaaaagcggggatgcagacgtcagaccactcatgcggtccagttgggccagacattctgcaacctggcgaaggaatttgttctctgccagatacttggtgccctcgggggtcataacgagagtgcgcatgagaacacagccggttcggacatatcgttgatttgcttttgtgtttggaaccatggcaaagcgatatttgaaaggtcggtaaaacccaatgagacgtttcatgaacttggagcctttgattgcctcatccattctttttggattcgtaagaggaccctccactagacgatgaataatatcccatttccacttattgaagttgacggtgttcaggacatgagtctccagaatagcattgcggaactgggtctcgtccatggaaggactcatcttgtccttcccttgctcagcagggagcagagaaactgataaatctgtctccatgttgtatcgaccctgcccactgggatatccaccagaacgcgccaatgtccgattgatactatcgatttggaagatagttgcggttgaaaggtcgtgattctcagtttcaaagtcgactgcgggtgggattaggtgtggaagcacttgaagttgtgcgctgacggcttggggtaaagaatgctgggcaagcttgagaacctccgtcaataacagagttgctttacgtctgagcgagagatccgattcatcctcgatgacgtcggagagaacctgtattcggttaactcttgcgctaagccaggcctaggggtaaaaaaaatacatacctttgggagccctgcctcaaccaaaccggccaatatgagagtagagaaatgagcagtcagatcaaatctgttgctattggtgtcattgagagcgcggctggctcttgatgtttcaaggtcagagcgaagattcgagactctgccataagttgtgagtcttctgcccgcaaggaaagatgacgaccaggacgggggttttattcgcagagcgtcgaataatagctccattatcaagtctcgggctataggatcattgtaatgaagcgaatcaaggagagaacgcaacggttgtgagtcatgtcttgcaagaataaccagtccgggccaagtcttcagcatcgcagaaatggctcgcgctgccgactttaatcgcccactgcgtaatgtgtcggataatgaatccgtgaaaggcgtaagaacagcttcaagttcagacccttgaagaaacttccgactacggggggtgtccacaacatgcagaaaacttgatatcagagactctgaggcgccgaacgtcccctctgcaagcgcgtcgtgcagggcagcaaatccaccggcagaagcaaccagttcggggtctttgaccaacatctcagccacggtcatgattgaaatgttccgaagacggtcttcatgatgttcagcaatagcaacgatggtccgcacaacggcgcgtgatatctctcggacaccgtctttgacatccaggaagcctctcacaaacttcagggcctgttccctctcaatgcttgccttggtttctttgaccagggacaatatcaccagctcgtcggtgtggagtgttcggatgatttgtagggatttgcgatcggcgatagcatagcgtgttagtcgataacccgcagctaccacctctttactgtcacttagaagcataacttgaacgcgtaggccaaaaacagaccacgcgaggtcatacttcaatgtgggatgccgtttgaataattcaaccaagctattggcgcgctcgacatagaaatcaggcgacatcccctctatctccaacgcctgcagcgtttctgagaggacataggttggtgactccacgtcaccatcaccatattcctccctatcaccatttaccgatccgacggcatccttgtttcgtgatggtgagcgcatgggactggctcggaaaaggctcgaaaggcgattgccgcgtggaggagtcgatgccggcgcctgcgcacgtaatatttcttcttccaactcatgctgcaattcgatcagcttgcggttcgatgagctcaattccgactccaccttgagacgctgctctttcgtttgctttggtggttttgctagcagtgcctccagcatattctcggttccgcttttgatcttcatttccttcgcgattctgtctcgaaggaaagcctgtcgctgttcggttgtgtgaaagtctgcctcgccgatcgatctgctcgcacgtctgttatattggtcgtccggccgaggcgtgacactgcgtgaagtggtgcttttgagctccgaactaaagctccctggtccaccgatggagggagctaacgagggcgccaatgatcctccccgtccgcccatgttgctgctccctccagactcggatcgcctgttcctcccgattcgtgagatactgtcctgccagctcccatcggcagagccgccatcctgactgagcgaggatcgtccatcacccagtgcacgatgatgagtcgacgcggagtatgctgagttgtgcccggaagccatagagctccatccagccgtgctggctcgctatcatctatcgcaagtgttctgagtatcggagggctgcattgaggtcgcttgttttagcgggagggtcgagcggagcggagcaagggcagtatggggaagtgtaatggaggggcgcggtcacaggttggttggtgatcaaagggaaatagtggccatttccacctgtcgaagggtgattgaattttaacttgagcacagcagtgatcgtcgaactgctcttgttgtcccactacgagatgctcggctcagccagatctggagaaacaaactgctgactaagggatcttatcgctccagccctggccaacattgcaacaccacgccatgctgaagagctgtgttcctactaaaggggttttcgtctcttgttgagaatggtctgatcattcaattgattttcatttgattatagtagaatctgaagatcgtatattctgataaactacttagtatcccgctctttcttcctaggcttgctcatactgatgaatacctacatgtaggtattttataccgttatcagttcattagttattgggggtagtcttctccaggatggtcttcatcatctcattgccaagagtggcagcttcagggaaacgcggcgcgaagtactccgcaatccgctcaaaccggtgacggtaggactcaaagtcaccgaaagaaacacagtcagaccatgcctgttgatcacatcaagttagcacgaactggagaatgggatattgcgaaagacatacccttgcggcaaacgtgaattccaaatcatccgagcggaaggtgttatcatcaattgcggtatccaatgcctcatccaggagatcctggttacggaacaggtattcggtcacacccaaccagagacggaaaagctgcaggatgttaatataaccgcaatctggcaatatgctctcaatgactgtatacataccggcgtggaacagatcatatgatcgtaagggacaatgccgagtttcgaccagcagtcaacaatagcaagcagactgagatggctgttcggcggcgccttcccgcgcggccgattagacagagagaaccgatccagcacctcgtccttcaacagcagatcttgtccttcggagccaggtctgaagactgacgcacctgcagcctttacccgaagcttgagctcctccctctgtcctccaatcatcagtttgtacaaatctgtgaccgactcggcgtactggcgaatctgctgttttgccgctgggttgaggatcgcgagcccggcatagacgtgccacttattcgagtagatgcgcaaggtgatattgattttgacattctcgataccgcctacccaccgtccatgctcccaggggaactgattgttggcctgccaggcggttcccatgctcaggaaagcagcatgggtgacagcctgcgtatccgcggttatacggtcgtgcatctcaccggtgagatagacatgtttggagccgaacgaggaaaggatcgtctcaacgaatttgaggctttcgtctgaggctctgtgttggatgaagacctaggtcaccgcgttgttaatgcatgtccgagatagaatagaatccaggcttgaggttggtcataccagaggctgaccttgcggattcactttggggccgtgcagcgaatggcaagatacaatctctacatcggggggcaggtgtttctcgaatgcggcgagctctggagctttgcaggacgtttggccaccgacaatggcaccgaccttggttgcttaaatccgagtcagaaagtgattgcgatggaagcagactagcggctctggttcgacacatacataatccgtactgcgccacgaccttgtcgatggctccagcctctacactgtacagaatgtaatcgctaattcttgagacgagatgtccattggggaatatggtgactcctttctatatatacaatgagcttcttgagcttttgggtggcataatcccagaaggggacgtacttgagaagcgaactcttgttttaaagattcaaaattctcaggtctatcacacgcgtttatccttgatatcaaaatgcaacgttagttatgtcaggtctaaaggattagttgtgatgaggctcaatgtgaatctgtaaaatctttttcacttgttagtgaatgttttcaaacaacagcaaagtgaaggtgtatagaatgaggttgaacaggatcagacaaaaaaaattaaggtagcgtgggtgtaacatcaccgacagccagctggttagccatcaaccagaatggtatgacagcgccaaccaaaccgtactcgagccaaatgcactcatgtcatcatttgaggggatgggcaaagaaagacggatgggataggaagcttaccatttgaggcattgggactgcggcgccgaaaaaaaaaaaaagggccatttacctccatcctgcgtcgctcaggcgttgggcatacattttgcccatatcacccataccaatgatgccgatcgaggcatcttctttggtgcgacccatcgcgacaagtgcgcctaaaacgattgaggaataatatgtggcccttagagccggtgaccaagataaccactaaaggttgtttcggaccagttgaggttcaaacttgaaaactgctcgagtctgggaagatcaattgcaatgttagagagaattcagttgggcgaacgaaaaatttaaatactgaccggagccaggaccttcaccgcccaccgggccgactagagatccggatatagatgcatgacacctgaaccctgaggaatccggctcgcttgaaagtacgaaccaatcacaggtcgtaattttccctagggcacacacccacttttttcttcaacatccaagtgggatcagatccgacttttccttcctttctgtattccatccacactaaccaccaaaaacagtcgcaatggcccccaagaccaagacccccgctgccgctaaggagaacgtctccctcggccccctcgccggtgatggtaagttaggaacaaaattcgagttgaagaagttggggaaaaaaacatgagatctaacctatcttcataggcaagctcgttttcggcgttgcccgcatcttcgcctccttcaacgataccttcgttcacgttaccgatctctcgtgagtcgccctccacccgcaattgtcgtattagaaatcgagcgcaattgaaatgaacgtaacacgaaggatgatgttggctgaccaattttgattacagtggtcgcgaaaccatctgccgtgtcaccggtggtatgaaggtcaaggctgatcgtgacgagtcctccccctacgccgccatgttggctgctcaggacgtcgctgtccgctgcaaggagctcggaatcaacgccctccacatcaagatccgtgccactggtggtaacggcaccaagacccccggtcccggtgcccagtctgccctccgtgctcttgcccgctccggcatgcgcatcggtcgcattgaggacgttacccccaccccctccgactctactcgtcgcaagggtggtcgccgtggtcgccgtctgtgagcgtgtgcggcttggtctttccctttcccttgcaagtcattgcattgctggattggaggctatttgcgggcttctcctgcatctgtggatggaataaacgcgaggaacggccttgatcgcctggtcttcaatttttttcatacgctgaaaatcaactctcgggttttgctgttggattaggtagtgctaaatcaataacttgacctatatatcctggattatagcaagctcctaatgagctcagttgtaagatgatagtagttaccctctagatttacgaggcctggtgaaagttcccgtgggacatgtggatgttcagacattagtttattgttgttgtacagatgtgttatgtatcgtcctgctctttaggacttcgtttgcaccttcgtgtatcatcccgcgaagcatctacccattgacgtctgaatttgtgcagtctcaattgtaatctctacaccttataaaggactcttcttctgtccttgctcctcttctttttcttcctccatcaccttttctcttcctcttcctcttcctctatcccctctcttccattgtctatcgtctctctcctcttgtcaagctcctcctttccatcttaggatctttatttaaattataccccttattcacctattatgttcatgttagggtgttggcaaggggattcttttgacccttcgaacctttttgtgtgatatttggcattgtttttgccgggaagttcccaagtatacctcctcttctctcggtaatggacaaagccatttgacttggtcgcgtacttttagcgtgcctgtctgcattcttttttgagtgagaaatctgatcacagttaagcttattgtgcatcaaccaccatgccaaaggtgcacgaccaagtcaaacggccctgtctcctaccgagagaagaggaggtatacttgggaattttatgattaacacaatgccaaatgtcacggaaagaggatccttgttgattcttaccttttcttagaatttgttgcttgtattaatagctatgtggtaattctataatgttctaatttctagatgatataattgctttgcttcgctccgcaataaagtaaagacctcgggaagatccaaaaaagatcgcctcccgataacagatagaactgcgtttatccgacagctcaaagtacgcaatcggttccaacctctcctcacagctccaactttccctcaaagcttcaactttgtgcgcaatctccaacacaaaacgggtgcaatgtccacccaccaccccaccccaacaatcctcctcccaggccttcctccaaaaaccctcgtcggcatcgacctcataaccttcacatcaacccccaacttccacggaatccgtgacctttccccgggatggcacttcctctacaccggcgcaacagagaccctctctttgcgcagcggcgcatggttctacattggtgacatcacgactgcagggaaaggcagtaacgacacagcgctagtcgcgcaaggccacaaaaatcaaacccaaaacgcatcagagccagagatttacatctggaaatggagcgtgaatacagagtctttggtagcgctagatggtgagagcgcctcatctctccaagagagcatgcgctacaaagcgaatctgggttcggtctggcagagtggaggacttttcaaatatcgcagccggattgcgccctcaatgcttgtcaaacccgtgacagaatcagacactggcgaaaagaacgagcaagaccaacccgaacaccaaatcgaagctcgtatccagaccgaagatgattcgcaaacagaagagagcgggcggagggattggtctggactaaccgaccgcatctcaccgagccttttatcacgcgttatcggcaaaccggaggttgatgtggacgggcatccgcgatgggcgttgtcgtctgcttcaacggccaactgtgacgcggatcatatccctggcgtcgattcgccagctgaagggtcgcacgagccagaaccggaacgagaattcggcttcattcccgttgatttgaagcggacgtggagagaaggcgctgtcggacgcgaaaggacggaagctgcgaaggatcggtcttgggctctgggagacttgatcgatcggtatgctggggaggcttctgggggaaatcagttgcttggagaactgcagtttacgttcctcatggtgctgactatgatgaactactcgtgtttgcagcagtggaaacggcttcttgagctgattcttacgtcccggggtgcaatcttggatagagaggcgtttatgagtgaagttcttcggatattgtcgttgcagctgcaacgatgcgacgatgttgatggtggactatttgagattgatggtgatgaaggcggggctttcttgcgagatctactcatgaagctgcgtcagtcagtcgatgacctcgttggtgacagtggatccgaggtcaagttagagcttgacaagcttgaagagtgggtgagggcagaatataactgggagctgcgtcgtggcactgtcgttcgccacggtatgctccaattggaggacggcgagcaggtcgaaatggactgggatgggaatgacgaggatgacgagactggagagtatgctccggtaattgttgatatgtgaaatgcgagaataggacatcgaattggttctatctctgcgcactcatgagatgtgtaaagtaattgacgatttccttttggtatctagcttgggtgcatttactggcgtcttgttacattttacaataaccaaatgacaagcattgaatgaaacaacggcatctatgaatgaggtctaaaatctctatatacagttcaaccctagcatcaaagataccaaccacgatgctaagcttcatagacctgcataagcggcgtcaatcaaacagcttgcgagtctaaatctaaaatcatctatgaacgctttatttatctattgtccctcgttctcgatggtgtaagcccattcatgttcttccttgccgaacataatggcctcgagccacgacttgatctgcgcggcatacccagcaggttcgccattggcgcccagggtgttgatatcagtgtcctcgttgtggatcaaggcaacaggggtaatgaagtactgaaggacgtgacgttagcatatcagctccaacaaaagaaaatagacaattcttcaacttacagcagtgccagaaacaaacgcctcaacaattcggccctccttggaagccttctcaatatcatcaatagtcaaagtgcgctccacagcctcaagcggcgcaagctttccgacaaagttctgcgacaaacgctcgcgcacgagctccagaacactgcgacgggtaataccgggcagaatgagctgattgtcaagaggagcagtaacaagctccagcttgccttcggtgttgtgccagacaatgaagaagttactggcaccagcctcggtgacctggcggtccggcccgaacaaccacaggatctgatcgtagcccagagcctgggccttgccgtgggcctgcaaagaaggaccgtagttcgcacccagcttggcatagccgaagccgccgggccaggcacggatggtatcaggggaagaggcgtagagtctaaggcccttgggggtctcggcttggggatccttcttcattttggtcatgtcgggccaggggacagcaataatgaagaggagggcttccttgggcacttggacgcccaggtgaggaccgtttccgatgactgttggacggatgtagaggtaagaaccggggttggggagccagcctagagacaattatcagtggatcgctctcatttgtattgtaggcaaggatagcctggagatatagtgatattggaacatacgagggccgtcgatctgcagtagcttggcgacaagcttcttcacctcatcgtacttgaatccgggcagcgaggaccgctgcgaactggtgttcaggcgtgcgccattgcaatcggggcggaacaggcgcagctttccgtcgtatccgcggtacgccttcatgccttcgaaacattcggtggcatagtgtaggaccgaggctgtgggtgggatgctgaggttctggtagggcttgacctcgggggtctcccatcccttggctgcggtccatttcacggtgaccatgtggtcggtgcagtgagagtggctcagctcctctggggagccgggcaaaggcaaatcgcggaggttggttgagcgagtgatattgaagttggaggcatccagctcagcgacattaggagcgacagaacccatggtgagatgattgtggtatgatcagggctcttttttggatgtggaggaggagaggttctatgagtcaccagacggtcaatggatgatctgaaaggaaaacaaaactggcggaaatgaagctaccttttgaaatatgtcttgcacaaaagaaacaaaagcggtttgccccggagaacccatggaatgcccctcccaaaccgttttcgatccaaaaaaaagttttcaacgccgaacggttcgcctctctctatttgccaccagaaacattctacattgcacactgttatatatacgctgtgtgttgaaggattgatctctctgaaactatgttgaataacttccaactcctggaacggtctttccctctactatgagcattctatgaggggtcaaatatttgctatcttcaggcccactttcggcatctccgaggctagccgcgttgatattcactcacaattgtagtcttcatgttcttatgacagtctcgttcatattaactagtccgatcgtactggtttatggaattacattgaaagtcttggctctgtagtctgcatgatccttgcatgctttataccctcaagctttgctcggggtaatatgtaagaagcatgttgccttctagaatacatcaatgtgtagtactccgtatatccaattgaattgatcaagcatggcaaaacaaggcctcgaacaccctcaaggaaatgatggtgtactttgtaccccagtctacaccaatcataatagctgaatgatatttccggctatcgtatgaccatcttgaaactcgatcaactaatgaactatcacaacacctaaatgctatctaattgggttaattgggtcaattgggttcatggagcttgataaagctgattttgggtgatatatatatcacacagcacattgaataccatcaacctttctatatattatatacaacacaacacaacacaacatgtatatgtatttgtatctagtccaaaacacaaataggttattgcgaccttatccccttcctcgtttattttctagctccatcttaacaatgtatcctgtacattaaactctattcaccatggccacaccttggcggttatattctgcatgtctccaagagaaaacaaggcaatccaggctttcattcacaattactctttaaattcctccctacaacaagtggtaaggtctcagagttccagcctcattccaacccggagaaactcctaccctagaggcccattccttgacattggttgggtcggagaaggtctccgtgccattcaacgaccaacgacaaaagcttgggtatgatacataatgcacctcggaagtgatatctgcagccacccaggtgccatcctgttatccacggtggtctgatggcaacgttgctagacgggacttttggatagtgttgcttcccctcgtattcccaagcgagtcagagccatggccaccatgactatcgattattggaatctggactagcacattcttagcttatcatgaagtcagaaggcagaggccatcaagatggagggtcgaaaggcttgaattgacggtcgtcttgagcctggaagatatcgacacggtaattgccgaggctaaggcgatgtcatatagaaccgaatcgagcctctataaacttgcaatcacatgccgggtgttgatgaatgtggaatgtgaaatttgagctgactcttttcaggacacggtcgagtgtatattgccctatcagaatgcaatttatagacactcgggctcagcgcagtggatagaaacatgttctgggtacttaacttagtcattcctctgagttattcagaaacctttcggtgtttagtcgatatgtgattcgacttgggatttgaaagatagatatttcgttatattgaagagcccacagacatggcattgatcacctgggcaagaacgacgggttagaaatcatctaaaacgtgtggaaacaactggcttacttctttattgtataatatataagttcctactgtcaataataacgaaggaagaagagagaagaagcagacatccatctgaaaatgctattgtaggaacaaacaagatggggattcgtagtatggatgtaaaatgagtaatgcataaaggaagaactatcacgcatgtgacattatttgaggacatagatatcctcgttctattctatggatacatctattgtaatcgttcttacccggaaggtcagatagctattgaccctatagcttttgaccctaccacgaataatcccatgacgactacattatgtctcggagaccgacatactatccttgacagagcgtaaaaacaagaataaatgacatgaatcatggctacatgaataatagttcgccaaggagacgggcggccgatcggtttgagaaaaaaaaccaaaacgtaagtgatgatgggggaatttggctcattatcgaggcgtacacaataaagaagaaatgcatctgtaagggtcctcgataagggcgagactactccgtactgtcgggcggttggtcggcagttatgaccgccacgaggtctatacaatatagaaggactaaggcgtgatcagacgctgctgccttactatatgacagatctcaagccaataatgcagactggatacggacatgtgcataagctgaagcatcgcttgctgatatctgacgattgaatacaggactaggctaaaatctcggggtttgtcacagaaatcaagacctaagaccgggctcagtaatatgacgtatatgattagctgcgaactattatttctggctgatcttagcctaaagagcatgagtggtgagagaaaaagaaaggaaaagagcgaacatggcttgcgtatgttatacggagtccggaagtagaatggcaggtgtcagaaaatcaatccacccgccgtgatatgcaagagccgagtttattgggactgcaaaagcaaagatgcgaaaaaaaaaaccttggcgacgaaaaaattggatatgtgaggatcaaattactccgtataccccgctgcatctgcaatgcattcacgggccgtggattctctgaaagtgaaaaaaagaaggggtctttaactactccgtaatagaaagaaagctaaatgatgtgtctatcactatttatatcggagcagattatagtaaggactccgtacgtcccaacaactattcagactcagccacagtaacatctacacaagaacagatataataaacctaaaaagcgggggcaaaggtggtgatcgctaacggtgaaaacatccgaccaaccaaagaaacatggttgctttttccgaaccactgatgagaagtaaaatgacctccagcctcactttgtatatagaaatagacaaatatacttcgtatcctcggcacatcgaggtaggggaagggaacagacccaatcgaagagagataagcacatgcaattccgattcaaaagtggtctggtccagaatattcaaatcggaactaccgagcatatcagccaaaactataggataaccgcgttttcttgtcccgcttcacgctacttctgcttttggcaggagtcttctcctatagaaaggcgcgggggctttcatcacacatgcaggtgatagagattcgtaactcacgttacattgcaggcaatttggaccttcgtgtactgtacttttggttgcaggggtccgaggaaaaggtttgttgggaatctcgatgcccaagaaacacgggaaagaagagggggatctcagccgcatagcagatctcactggctcgtgatcccggatctaaacagggctggaacttgtcgtgcggagcgaggcacatatatcgtgttatactttctaataacctcaagcaatacgatgtagagcatcggagccggcgttatctcttcaaatttcagtttatcaggcgcgtaagcggcagtacgcgacgctagcatgtgtagttcattttcatttttccttttttttggtacaaaagaaaataatttattattctccgcggagcccactgggatggggctagtttggaacggcccgagaatctacttgaacagctagcgccggactaatatactcactcctgttgggaaaagtattccatatagtatcagtgctccgtagtggggctccttgtatacacaatctacaacataatacgatgtagatgtatagagtacaatctagatattccaactcggaaaatttgcctagctaccctctctacgtggctgacaccatccccagcgcagcaatgcagtgttgccgtgagaatgccaactaggccagtttctcgatgaaagtgacagaatgccaagaaagaaatgtgttttgtctatgattccgattggctgttattttaaccgccaatgaaaaccgctggaagaagttatgtgggatgtatcgagtaaagtgtcgaccaaagtgatcaaaatggccaaggggggattgtcaagagcaagaaagcaaattatagggattggatcatgacaagatccaagtatcgagatagccaaattataattaaaacaacatcgaaggggataggatgttcaagatgttccccctgcaaatcccgattcgatccacagcgagaaaaaaaaaaagactttaagacgggacaaggttctaagattgtattaccggagaacggagtaggcgtagtacattcatgaatacgatgtacgatcttggtacatagtaagtccacttcatcacctaggaactccgcatcacagcgtgtagcagcacatctcgtggtcgtcccatcaaccggtgtgttggaattttcacctccttcgtgcgaaccctgcctgttggaacatttttccaggcattcgcccgggttgaaatcacaattccatcttggagcgaaggccgcaggtgtcagcctggctggttagtagaccgggtgatatccacaaatgcttacccggatacagttttcctaatgtcttcccaattagtccatgaagaaagtggctgaaagtggaggttatggagtccggtatatggaattgatatatgagctttgtagttagttgaagttagttatagttataggaaaacaaatccggcgtcagtgtcccaaacccggcagtatgacggggccggcatatctggataatccgatcccagtcttttgccaagtgagagaattagaaagacaatcaggggtagtagaatcatatgttcagaggaaacgccatagaacaagcttgacaatgagctccaacaaggcatgtattccgagagggcatcaaaatacgcacatcgcagagatcgcgtaccgacgccccagagtctcctttggtactccgtctccgtactgatacatccctggaggtggttttttttctctctcattttttcccgtccgtttttctgtctttcttttttcttttttctttgtcgttttttgattcgcccttgatttttgggggggatttagtatctcgtgctttgattcaggctggcccgaaggctttccatattcgatctgccgaatctcttgacagtatctcccaggcctcgactcgatggcccctccgccatctgcatatcatcggcttatattggcaagttgatgaatttgttcgctctccaatcacagctgaattcgagcttggactaccgggttaccccggttgtatgacgggcgtcgaacctccccttctgtttgctaaacgcccccctcgcttttgggatcttgtcacctgcaggtgaaatttggatcagaccgattccagaatagtttcttttagttgtgtcccaccttcacgcgtaaataacgcaccgcaccgtgacgcccgtatcattgcgacatgacacttaccccctttctgacatccagttggtgagacgttggagacgtcgatttcgatggcctataagaggaagcgctaggaccctggtttagcgctatatagagagttgtttgcctgcactttttgcaaaatcactcactatttgtcaacatttccgccttgctcaagattcaaccacggtatatttcggccataaatctcgaggcacagccttttggaaatcatactcccaatggctggtcttttgaagatgaagatgaagatgagccatcacgacaacaaaccatttccggcgttggctccaggtccgccgcgcctgttcgctccgcagacgtcgactgctgtcagtaggccaaagaagaattctacggcttgcctggcatgcaaagcagcaaagaggaaggcaagtcgttgcatcagtgaaccgtgaacccctgaattcccccctctttctccctctctctctgtgggttgtcacaaatcttggaacaaaacggctaattttctggttctgcctgatacagtgctcggggccagatgccccatgtaaagcttgtcggtccacaaacaccgaatgtcacttcgatccaagccgagacctcagacgaaaggttgccgtgaagcggacgatccaggagctcaccaaccacaaatatctcctagagtctttgctaagcacactcgggtcggctgaccaaccccagtttgacaaagtgatggatttgatccggaagaaggcttcgttccaggatatcgcccatgcggtcggaagccccgtcacgacattcggagacacccaagatttgtcgactgccagcagattgccaatcttagagtatggggggcatgccgtagaaacttcaggcaacgcggtgagacgaccatcagaccctggcaatataacaagctcaccagaagagcctccaagcatgaaacctccgcagtgggcaacagttagcccttatgctcgtatcacactagagagcctctgcgacatacctctcttcgaggtgtcggcaaagccgtggacaagtgtcacagatgatgattttctggtctcgcaactagtctcgctctactttacctgggaccacccatgctcgcagttccttgatcaacgtatcttcctcgaaagtatgaaattcgggaatcgaggatcagtcttctgcacgccccttctcgtcaatagtttattgtcaatcgccagcgtatggattccggaaatttaccacgctacgaaacaattcgctaacctcgataggcctattctgatagccctgatgttctttccacccccgagaacatgttctcgcggggtcagaaatttttccaggaggcacaaagattgtgggaggttgaagacgatgaccacgacctgcctaatatccaggcgctcctcatgatgtgctgtgtgtatgtttccctggtcttagaaaataagtcgtattcatgagattgatttctttgcagatttaaatcccaaggacgaatcaagaaaagctggacgatgcttagtcaagcagctcagctggcacgggatataggactttttgatactccaacagtgtcgggaaatgacatgtcgtcagagatggaacggattcgcacaatcactgcgtggggtgtcttcaacgtgagcttgtaagcgctgcctaccatcgtaagaacgaataatgtccaactaattggcgcagacaaatgtcgattgagctgcagaagattgttcccttagcatatcccacgtgcggggtcaagttgtgtggcgatgaagactttggctggataccgtatcctcgctcaaacaaaatcacatttgacaaaaagccagcccatctccctcaagtgaggaaaggattagctgagatcaccatgatcttagtcgatattcagaagctcatttctgaaaaacgtcggggcaccagctttaatgagctgtggataaatgctaatgacccattcgaccgtttgactgattggctgagacgttggccgagtgtgtctgctatacaacgagatccgatcccacaggtccttctcttgcggtaagaatgactaccttcctgttccgtgtaccccagtgactgttgtatgctgatactgcgtgaagaatcaaatgtctccaggccatcatatacctgtttgaggttttcaatgacccccgtgagccacaatttgcccaacaggtccagttctatcaggctaggtccgccgagcaaacggcgcattgtcttcgcatccatcgccagtcgtatggcctcagacatatacccatccaggtagtcgatgccgtacagacaggccttcggatcttagtccatcaattggaaagaagtgacgaatcgaggcaggcgtttactgagctttgtcggtttggaatggctctgagccacaggtttaagcaaacagccgacgtgatccatgagatcaggaggaatgtgcagcatcgaagtatccgattaccacctgatgttgttgtattgttcgatcacccggaacggtggaggagtctcgagccctgaaagttagcatgacacctgtgcttgtgaatgtatgaatgcatctatttcgctaccccatgaatgatattgaaagaaatttcaccctactgcagattcgtgtgaagcaaagatggaatgtgaagtggatgtatcacgacggcaggaccggaacgaaggtgatggggaaaatctgcaacatcctagaaaactgtcacggcagagtaaacattgagactggcctactcactctttcataatggccagtactctgccttcctcgcaagcagatcggagacaaggacgtgcagtgtcaccgtctgtggtttgaggcaaaacaagggggtcaaacaacaacgttaactgaggggaaggggctgtcattcgcagaggcctgttagccgattacaggcggccagttgctgacctctgatccaccggaagtcttttccctgcacatttcacactcaaattactcaatgaaatcacacgcttgagaaatattgaatttctctagtgctggacttcccaaaattcctctagaaagtacaaaaatgggtacttacttgaactgacttggtaacgtgctaaagccaaccgtcttctgtctgctgagatacagttaggccctgttacgcccatcttttatatttggaattaccctacactttggtcagatggaaataggtagatacatctagatagtttaagtatttacaccgagtacaccaagtcagtcttaaagcaagcattcgaaagagagagcatatacacgatcacttttcaaaggttatagtacagagaaaagtcgcgtttagaactcaagtctctttatggccttttcctgcggtctacgtaaaaatattaagaaagggcggaaggtctttatacaacaaaacatctagaaagactacgatcgaaccaactggatcgtatcgttctcgacagaacgcggccgacttagtcttgtatatcaagatgtggaacagccagaaagagtatcaagtctgttgagaatgtccagagcccctttcaccatcaacttgtacacttcaggacgtttactcctttattctacctattaaatctctacttacctaggcacttggtatctaggttgttgcaaagctatagtgaactatatttgagatggaagtatacagtacatgtattcccagccaaaacaggtgacagtctcagtaccctgtacttatcctggccttagtgcatcaggcacaaaatctacacagctgagtcatcttgatgcttatgcccagataagataagcacaaacacccaagcgaaaaccctcaaaattcgacttctttggcaaatcgcacacgccgacgctattcttcccagccaaaacaggtgacagtctcagtaccctgtacttatcctggccttagtgcatcaggcacaaaatctacacagctgagtcatcttgatgcttatgcccagataagataagcacaaacacccaagcgaaaaccctcaaaattcgacttctttggcaaatcgcccacgccgacgctattccccccccccctccccacctcgccccttccgcttcctcactgccgtttcatctcggcatcttgctgcatttttaactcttttcttctccccctcccactcaacatgtcctacgacgaccgcgccaatgcgcgccccaacttgaacgatgagtccgataatgaggaggaggctatggtcaacgactaccgcgagcaggtcaacttcgacgatggaatgagcgagctggaccagaccatgtcccacggtggagggcaggctcaagaccttcaggcccaactggccgccgccgccactccgttggaataccaggctactcttgagaccaaattcgccagctacgacaactactgcagtctgttccattatatcctgaactccgatggccccgtggatttggaggttcctaatgtaggtattccgttttgccgaccgattgttgaacgccatgaatgaaaagtaaaagcttggcattcgtgaaatcaacaagtcgattcatccctccaaaagacaatacggataactaacaatgcttttctacaatcagtactactgggcttgggaagtcattgatgagttcatttaccaattcgagtccttctgccgttaccgcaaccgcgttgctcgcactggatccaacgaggaggagagccagctgctccgcgagaacccgaacacatggggctgctactcagtgctgaacgtgctttactctctcattcagcgctcgcagatcagcgaacaattgaacgccactaagcgcggagaggacccaatggctgtcgccggcgagtacggctcccgccccttgtacaagatgctcggctacttctcgatcatcggactgctgcgcgtgcactgcctgctcggcgacttcagtcttgccctgaagatcctcgacgatgtcgagatgaacaagaaggccatgttcgcccgcgtgatggccgcccacttcaccacctactactacgtgggcttctcctacatgatgatgcgccgctacggcgacgccatccgcatgttcagccacatcctcgtgtatgtgtcccggacaaagaacttccagaagggcggcaacaactacgaagccatcgccaagaagaacgaccagatgtacgccctgatcgctatctgtgtggctctccaccccacccgtctggatgacaccatccactcggccgtccgcgagaagtacggcgagcagttttaccgtatgcagaagggtggccccgaggccctgcccgtctttgaggagctcttccgctcttcctgccctaagttcatcaaccctactcctcccgacttcgacaaccccgcctccaacgtcgaccccgtcgaccaccacaccgccatcttcatggatgaggtcaagaacaccctgttcaaccccaccatccgctcttacctaaagctctacactaccatggacctcaagaaacttgcaggtttcctcgaggtgtcccccgagcagctccgctcgtggctgctcgttaacaagcagcgcagccgccagatccgctgggtcgacggtggccttctggatggcgagcctgccatcgccaacgatctcgactacgctcttgaggacgacctgatccatgtcagcgagaccaaggctggccgtcgtctggtcgactggtacctgcgtaacctcgctcgtgtctactaagcggggccagtgtctcattagtgtgccgagagttgaaaacaaaaaaaagcgaagagtggtgggagccttctgcttacaagaagaggaacggacatgacttgagatgaattttctttctttttctctgcctactttgttttttattttccatattatactcattgctctcccccttccccctcacgtttcttctgttgttttcctttttttttatttttcgagagtcccccgtccatggatcatggaagttcaaggcttcctggtccgttcaaaatcaacttcgagtttgattatcgcgatttccttggtgggcgtccgctgtttcatgtgtcaccctggtctgctgtcgctgcttctttgaaggcagatggttaacacagcatggagagtatttgtgtcaggtagaagaaaaacagttacttgatgaaagtattagatgaccgagaaatacttacatatttcaaatatttcatggtcactgtgcttaaacgattgctctgtgaatagtattttggatgtggatgagaaaaacaaaacctagaaacttcaaattcaatgaaaatatttcataattactaggcgcaggccgcatgataaacgtcttctatctacatgtacaagtacacccctctctgaactgaattataacaataatagctcgcctgtagcagccccaccagccagttgcggctgatacacctgctgctggttctgggtcacaacgtactgtgactgaggcgcacctccaccaccggtaccatcaaggtccagcgaagccatttgctgggagccgataccactgaagtaagcgtctgctgcatctgctgcttcgttcatgttgctagggcctgtagttgcggcgttgatgccagggccgacagggagagatggaggaggaccattgtacattggcgtgacggggtcgcctgtggtgataattgtggctagaccactattactggttgatgtggcagccatgtttgcggagggagggttgtattcgagcatattacctgtaccgtcatccacttcggaacgttgcaaggctgggctgggcataagacgccgaggccgggcagcgcggaagacttggtggataggcttaaggtagacggtggctagagtgccgacattcagacacagttcctcgagagtgcgtgggtctagcttttcgctctcggccgtgattgggggcttttgacccatgacaacctgcttggccattgctgggtctgtcgacagcaagcgccagtacatgtaaccgcggtcacgaagatcagggtcgtctgtttcttcggtgcaccatttcagcacttgtggtacgagctgctggcccttggtggggcgttggatgaaaagtttgacggtagcggtgagcagggccagctgcacttcgaccgtttcgtcgtggaatgtggccaagtagtcctgaaggaggccatccgagttatctatgcggtccgcatactggccaatgatccaaatgacagcggccttggcctcaggctcatccagatcgtcgatatttcggataacatgactgattatactttcgtactgattggggtatttgcggaagatgttgcgaatcactactgttgcctcttgaacgatgtatgggatcttggcatcgaccagctccaagagcgtttcgatacactgctttgcagcagattcaatcttgatggccagtttgccaatggcccggacggccttgcgcacaaagtgaacgtcaatttcagtggcatatctgcgaagtatatcagtacacgtttgatacggtcaatctgagaagttcctactctcggagctctgccaacacaacggagatgttctcttttgtggtcagcatgaacattaattccagcttggtgactttgacgtagattggatcgttgtaattgcagaaaaacactcggatgtcattccgtaagacctccggtctcttctgaagaattaagatagcattgcgcagagccagatattggacctcaggcggcttggagagcaatgtgacgagtggtggagataacttcttgcataacgaggtgatatgcttctcgcctggaatgtagttcatgagataaagaatgacacggcatgaggttagaacgacagcagaatttgaatgcgatagtcgcggggcgactcgctctgccaacagaagcgcctctgcggaatcctggggcacgtacgccattaatgcctcgaggatgtaagtttgaccccatctatttgaactgttaacacgatgtccctagatatggagccgaagatgcttactcggagcagtctgccaggattgaaaccaatttcgaggcactaacatagtcgatggtgagtgaaatcgattcactgcggccccagatgtccaccaatgaggctaagacgctggaaacaacagtcgggttctcatccttcaacatgcggttgagcctgtcgattagatctgagttctcaaccatctttttatcgtgctcatagagctttgcaacgcagaaagcagccgtcttgcggacgtatgggtcgttgtcttgcattaggcgtttgacaggttggaacgtcgcttcgacaaattcgcgaacatgcacatatgagatggttcgcagtgcaagcgcgcggacaagtgggttgttatctgccatatcctataaagcaagtcagattaatttgaatattctctcgtgacagcggggccatacatcaatcaatataggtagagccttcaatgcaacctctggtttcattctcgaataattgaccaggaacaagaagcacctagacaatgtattagcaagcgaccttcattccgtatggcaggccataagcatcattacatcttcttgatctctaaactcggcagattcatacaaccaattatatccggaaatagcgcaaccatgtcgttgttgctcatggtcatattggcgacaatcttcttaagtgcgatctttttggcggaatagttcttgtcttttttgccgccgctattgagctcttgccgtagctctgcaaccttcccctgtgtattgcgcacgcgtaagccatggaattgaggatagggagcaatacccatgaacatgagggcagatataatatggttatttggagtgatgtagggtaaagcaaatcgcctatgccaaatgcaagggaatcgagtaagatgcagaaggcctgagtacaaagctcaccaaagcgaggggaagtgaatacatggaagtagactgcggggaagggaggaatggccatgatacgatgtgggagaaatcgtgcaatcaaagaacaggttgggcgagctaacgtaccctagcgaataacttcgcatctcctccagaactcatggctgcggtatgggcgaatagcgattaagcactgcaaggcgcaatttgttggaatgcgaacttcggcaagctctcgtatctgacaaccgtgcgatcaatcacagtcgagattggctgggggatcttcaaggataagaaagtaagacgcgaaatcgagtccaaagggtccgggccgttcggggagcttcgagagaggaaaagggtgagatcgagggcgtgttcacttatggcgcatgcgggatactcggagacaaattaaatcagcgattggacattgtcctttcttaaacaatagatcggaaaagaattaggagaagtgggaaataaagagagagaggaagagggaaaggagaattgaaggcggcgtagccactaagggaacctccctactcgggcaactttcaacctcccccgtcattcgattctcccaagatcatctcccccccacaccacatctactatcttaattatgtcacaagctcgtctaccacctcctcctcctccgcaatgggtagtttcgttgaactccccgatgccgcgcccctcaaaggccgcatccagcatcccagacccgccaggcttctcgagcagtcggggaggcaaacaggtgagttctaccacaaatcatgacaaatggtcgtgaagatactaatgcggttttcagcgccagcaacaacagcaacaatctatcacgaagagacccgacgagaccgacgcgcttaagatgaagaaagcgtgggagatcgccatcgcgccatccaagcagatcccaatgaatgccattatgatgtacatgtccggcaacagtcttcagatattcagcattatgatggtcctcatgttgtttaagggtcccattcagggtctgataggtattaatgcggcgttcgccaagtacgaaaccccgtcgacacattcgcgtctgcttggagtgaaggtggtctacattttgatgcagttggcattactgtgcttgggtatctggaaggttaatgcgatgggactattgccgtaagtcttgctctccagatttgacgcttatttgctaacatgtgtccagtactacgagatcggattggttagcgtgggagtcggaacggcagcctttggagcgggctcattttgctttcaggtgatgcgataagcttggagtacggattaagtgttgaaagaggttaatggaaatgcatccatggaagataatgcgatttggaacaacagctcatcatgacagtgatcatgttggtctaatgccttgtattattgattaaaaagttccataatcatgcatttcttgggcgcaagtttctaaaggggtatcggtatgaaagatgtagtttcctgatggtcatcgggtcgcggaataacccttggtcacttctgacttcttgagcattcccatccacggttttcttggctgcctctttcagacgacgctcttcacgccaatccggccctttctgaatcacgattaatagcagcggtgtcgtggccatcatcaccaacgcgatgaatgtgaaacaccagccccggcccatggcagagagcataggatcgatgagtgccgtcgcgccagctcccagtaagcaacgcccgaaattattggctgcagtggccttggctgcttgtgttggatataggtctaccaggagtgtactgatggtattgaaagcccctgtcaatgtcaatcccatgaggaatagaatacacgttggcgcagcgagatgaattccaaagttcaaaaaccacccaaacacaaggacggatatgcttcctaacgtgagaagagggaatgcgagctgaagacgagctttttcaataggaaagtttcgcaagtcagtttcgcggttcttggttagcgggaagttcaattgctttgcaagacggcggtagttgaaatccaagaatttgccattgataacagaagcaatggtcgcaccaaggccaaacggaatatagcagagaccaatttggaggtcgtctagcccatagagctcattgaagatagcaggaatgcttgcgctcacgtcgtagaatccagcaaaaagaatagcattgcagaagaggatgagactggtatccttctggaatacaatggcaagcgtctggaagggattgggaaacttgagtttctgtttggatacaattgcggtagatatgacgccttcacgagcctttcgggagtccaggtagctgatcagggacatattccatttctgaggaggcaacgagccatcaccgacaataccacgagcagtttccgggaagaaaatcagaaatggaaccatgaaagccgctgcaaaaatggtcagaaaccagaagatcgcccgccagcccaaatattgagacaaaagacctccaattactggaccgacagagggacccatgagagatcctgcggtgacgaatcccatgtaggaaccccgttgtgatgcagtggctacatcggcgaccacccccgacgagagcgcgatggtggtgctgctccctgcactttgcaagcaccggagaacaaaaagagctgcataattgttttgtagggcaagtccaatatttgctgcgatatagatggtgaagcacacgatatatgctggtcgtcggccagctttatccgcaaagtcaccaatgaacatgggcgacagcccttggaagatctgcattcacgttagtcaagccaaaaaggagatggtcctgtacacataagaaggcgtaccatataactcgtcaaagtcaaattgatcaacgaatttgatacatgcaggtctttcgccaaggtattcaacgcgggaaagtagatctgagaagagacaggggagaagaacccagcccaagaggccataaagacaatatacctgcgctgactgactgtgaagaccgagtagtcgacatcagcaagatccccgcttctcgttcccgcatcttcaccagattccggttgcgaaacagatggttgttttatttccttctccatctagggcgtcaatttcaagaccaaatacgtgagtaagagggccttggggacgcagagaaacctgcaacccccgttttttctcgctagctcgtaagcggaaaggatgcatatcgccatttgcggagataacggcccaaaaagacgtgccgagaagccgaagatgctaaatatacggttgatcactactctttacaaactacagcatctgcctagatataattatctagtccagactgtgaggaagggttcaaaataacggtctgatgaacttgatttccccatagttgaatctaaatatatgcagtcaaaacaatacgatagtacagaacagaacaacagtcaacgcgctttgacggcttctttgcatgcctgcaagaagatctgactgaactgccacacttccgtgtaagtgttatacaagggtgcaggagcgacacgaacaacgtccggttttctttcgtcaataacaaccccgttctcctccaaacaatgcagaacatgatctaacaatccgggctggagacgtagactaagctgagcacctcgctcggctggatttgatggtgtgatgagggtgaatggtttatcttccgaggccgcatctataggatacctcatcagaagatgttctagatatcccgtgaggttgatggatttctgtcgaatttccttcattgttgcccgtttgaagatttcgagagatgcgatgaccgcgttgatgtctaaaacagagggattcgacagctggaatccagcggcaccaggctgtggcagaaattctgtagtcgttagtctcgctcatttataatcagaatcagatcacgcactgttctccatgttgaaacgcgttttaatatctccaccccaccagcccgagagtcgaggccggaatgtctcgtcgctttcgggctgtttctcatctacagaaccgtggcgttcatggacaaatagtcctgctataccacccggtccgctgttgagatacttgtaattgcaccaggccgcaaaatccacgttccaatcgtgaagttgcaaatccacattgccggcggcatgagcacagtcccagccgatcaagatgcctttagagtgggcgtgagccgtgatccgttcaatatcgaagtactgccctgtatagaactgaatagccgagaggacgagtgcggtgctggaagcgttatcatcgatcactttcatgatttgttccgtggtcaaggtaggctgatctagatccttgggttcgatcaaaaccatgccgtccttcggatcgaagttatgatggcggagctgagattcaaccgcatactgaattgcactcaggttagcaccaacaacaaaatcgacaattaaaatgaaaaatcgagaacatacctggtcactgggaaaagccttgccctccagtataattttatatttctctttggtcgggcgatagaagcttgccattagcaggtgcaaattggcagtcaaggtgcccataactgccacttcactttggaaggcaccgacaactgaggccataagcttggatgctgcagtgtcaacatcgacaaacggaggtagcaattgatcatcatgcggcacaaagtgcccggtcacgcctttcgttgcccaagttcgcaagtactgctcgatatatttctgggtgctacgaggttgaactcccagtgagttaccacaaaagtagatgcatttttcatcagacgcttcattgcctaatgagaagatgataaagtcaaatgttagaacggacgccgcctgggtacacaagagatcctgatacgcactttcatctactgccagggtcttccgcttgagatcattcttggacggaatgataaactcatctcggaagctccgaagcggatcttgagcatcaagagcttcggcatactccttcttgtaggctctgatatcatctgcatagggaagcggggagccggttttgatgtcccgaacatgctgctgggaacccattatgacagacctaggtccagatagttcctagaatgcgtgtgtatgtttcacaaagccaagagctcgagtcgatcggagcttcagcagagtcatacagtcttcccccaccaccatctgccgatcccttccatatatggagattattctgccttgatttaccgactctatcagaccaatggcgtcactgctaaactgactaacccgatgtaatcggaatggggatgatttgatatcaagtgttcttcatctctctggtttatcttcttggaatatcttattccttcatacatcagccatgtcacgccctttattctcatcgacagccgtccggcggttatcccaagcacagacgtgtcggctcttctcgacttcccgaccggctttgcgcctctccgcattccccggcggcgaagtcgttcctcgccggccaagaactgtcgcaagtagcgcgtctcctctcaaacgctcagttgctcaaccctcgaactcccgctatatccgtcagccacatgcgtgtttttcctcgtcgtccatccgtccggcgaccaaggtgacgcagaacccgagaaccggagatgatggacaatcgctcatgattggcatttcgccacgggccatggaggtgagttgacaatggatttaatttcttttctttctgtttgtctacttttgcttcgatcttctacctggcctgtgttgggacggacatgggaagctctccaaactgcatggaatcaagtgctggggctctgtctcgatgttggcttgctttcagccgacatgggaagaccctatgaccgcgccttgggtccttcagatgctctttcaagcacatgcgaccatagggtgtggaaaacagggcttcccgtccgctcagccgtacttaagccacacgccggtgagttagtagttgggtgggtgaccaccagcgaatcctcactgttgcatgttcttttttttttttttttgttcttagcttctccttcttttggggggttttctatttattttctatttttgtgaatcaccgagctaacccagcgcagcgtctccgcgagatcacagacccaaccacctccccctctgctattaaggaagagaatccataccaccatcttcgcatcacagttaccagtggtggatgccatggtttccaatatatgatgtccctagagggggcttccaaaattgacccggaagaggatactgtgtttgaagcagaagcagacgaagccacaacacagtcacctggcgaggccaagatcgttatggatgagccctcactcgagctgttgcacggcagcaccgtggactatactaccgaattgattgggagccagttcaagattgtggacaacccccgtgcaacaagtaactgcggttgcgggacaagtttcgatgtcagtgattgattgagcaatttgtcccttggagggataggagagatagtaactatttactatattttgccctttcttctcttgttttatgtacattatactgcattttgcattttgtatactggaaagatagataatcacattctataccccccttctcttgaatcggtcaagatattaacatcgatttacggtaaggagtcacgcaatgccttttagcaggtcaacaaaagccttcatagtattttgtacgggagagaaagcgaggttatccacacggagggagaagttgcgtggatatggatccagtttagtcaatgtataatagctggcttgcttgcctagcttgagtcggggacatggattccggcacttgaatggaaatgacaagaataagaaagagaatatacagcattctttatgaatcttctggcattgctttgcgcttattacctcatgaatcaggcgagaaaacagaacatcccaaacctcatctacttgcactaagcccattttgatttccctcattctgctcattgtagtgggaggcactgtatatcaggtaggcgtatgcaaatgcaatcatctcacaatgagagatatcattaatattatatcaaaaatcaccaaagaaaatccttctgacccttcaatgccttcgctaagacttccggataccattgccgcccggtaaacccaattctagcgtcctaggggatcttgtgttccagggacaatcttagtgctcctggagatggcattggtattcctggacatctggagacggctcggtgcccccttggactagccctggcatacaattcgtgaatacatccgagcgaagatctaaagtccctcggagattaccttttcgggaaagtacggaaccttccagattcggaaccacagccttgttctatcatacacagcgatcattgactcgggataaagaaggaaggagctcgactccatattagatatagaggcataatttaatacttgcacaatgcatatgtggctggtatatatatctcacgaccgttccaaggttcccattcgattattctagccagtttgtcggacaggagttaagcgcgacatctcctaggggcacttcaattcatcaccattacccgctatggagcgctcggaaattacaccgagcgaacagcagaggtcggggtcttcagacacgtctttcgatgaaacaagctcgcccttaccatcgtctgcgagctccttctcagatattacctacggcgcagacttgaaaccatcggaagtgttgaagtcacaggtcgtattcgtgcccgatctgttttcctctatcatggcagttgagccagtagtaaacccaaactaccacaaagtaaagccagaagcagatgcttggattgcagagtatgcttagccatgctccccgatggaatgatatcaaaactgacacgagactaagaataatccaggccgatgaaaaatgggcttccaggaacaccagggtagacctggcctacctagcctccatttgggcaccaacttgtgatcaagaggcactcaggatgatgattgactggaaccattgggtaggtctgaccgtatcttatatacagtatcagagcaaaatgttaactggtgacgaataggtctttctttttgatgatcgtatggtagttcctttactattcaaataccaacgtgctgaccctgtttatcaatacagagttcgatgaaggtcatctcagtcgagatccagaagcagcccaagaagagatcaaccgaactctggaaatcatggaggacacacagccccccgtgcgatgggatgataaccctattcgatttgtcttccagaccacatgggatcgtttgaagcaggtaagggaataatttaccctttttcgggtacagaatcaatcaaacgctgacctcaagaccaaagcggtgtggcagaggtatgcttggtctaaagtcatggaattggggctgttgagcagagcggctcaaaagtcagatctttttactaacattagggcagaccagcaacaacgatggaaatatatgcatcgacatttttttgatggattgttgaagcaggtcaaagtaatgcatagtcatcaggctcttgggcgcgatgtccaagagtacatggatatgcgcagagggacgatcggtgcatacccagctattgcccttactgagtgagtccctctccataccacttcatcctcccagcagactactagtgggcattgtattgactaggtccaggtacgccattggaatcaatcttccaccggaggttatgagcaattcttctcttgaggagtgtatgtgcatctcagcggatctggttctcctgtaggtgcaagatagctcgaatggaacaccagattcagatggctaatattttaccgagtcaatgatattctatcatacaaaaaagatctggtaggttggccaagcagcacatgtccaagactgtcgaagctgaaccattcttcaggcattgggagttgatcataatttgatctttcttctcagagctcagggtctttcgatgcaagaagcagtagatagaataggtgagatgttgaacaactgctaccgccgatggtacagtgcattgcagaagatggaaatatggggagagcacatcgacaaacaggtactcgctttcattgatgcctgtcggaatgtggccttgggtaacctgcactggaggtgagcggagacaaattcctcccaaatctggaaaatccagagcgaaattgctgacagggtcacgaatagtttcaaaacaggtcgctacctcggtgccgaaggagaccaagtgcatgaaaccagaatgcttcacttgcctaattaagtaccacgcagggaggctaccgaatcatgcctagatttaggaagccagagatgctcatatgatacggatgccccaaggactttttgggtacgctcgacaaattagaattctttattgctcctttgaatccattgaaatagaagctcaaaagatcagcctacccgacctggatatccaagttttctcttcagcggcgttcatcggaaccttaggcatagatcgcatacatacgcccctctggatttagtttgaactccccaacacagctttgaaaaggagtgatcttgactttgctagatactgggggtgactaccggagttactacttatgattatcgcagagccgaatagctccgtagatgggactccgaaaggtagaggccgaaaggtagaggccgaaagattttcaaattgaatactcggctcaagaatatctgggaattcgatctcactcgactcctacccaggatttactaagcttccacaattcttcttcctttgcctggtcaaatgcccaactgctatatccatattcgagcgcatctccacccggtggtgtcggatgaattgccaccgatgcaccttccaaatacaagccgcccctgccttccagctcactcgaaacagcaccatatatgctggttgcgcaggcctgtccgagactggacaagtatgccattgcgcgcttgtcttccaagacagacttcatttcctcctgagaatatttctggaggttggggctcataaaagccccagggtggacgctgaagccatgaaggccttgggcgccatacaagcgctcgatttgggtggtcatgtagatattggcggtcttactagatccgtaagcaagccagccgttgtagtttccttcccagttaacgttgtccagaggaatagggctgtagcgatgggctgccgaggaaacgctgaccacacgagaggcgaagttaggcgaggaacgtgcggtttccaaaagggtgtctttcagcagatagaagaggaggaagtgcgacaagtgattggttccaaactgaagctcaaagccatctttagtacggctttcgggggtattcatcacctttgttcaattagcgaggtcgcgcttttgtgtcggtattaatgaactcacagccgcattgttaatgatgacgttgagcttggagctctggttgagaaattcctcggcacaggcccgaacactggagaggtctgtctgatccatgaaaagaagcttcacacgcccggtatcgagcaatgagcccaaagcctcctttgccttttcgatgtttcgggctgtgccaaagatagtcgctccagtagatgccaagacacgtacagtctcaacaccgatcccagatgaaacgccggtgatcaggacaaccttgtctgcccactggccaacaagaccttcatcttcgataatttgacttccggttacacgcgagtcgcctgggccgtcgagaacctcccaccgattgtgctcggcataccgaccggagagttgaaaagggacttgggaaaccatcgacatgttagacgtgatgacaatcgtgaaacgtacggtcggagcataaataatccgaggctggtttactaacgaaaccgagatagcaagcaagacttcaccatcgtgtgcggcgaccgactgcttatttcaaacaaagcatggcggggttcaggcgatgtccaaccggattgaaatcggcataagttgtcgggccttgctaattagggaatagaccatctactggggggtacattggaggtggatacgccgtaggatcgtggttgctattactactgcacgctagcactggcgaagcaaacatctattcccgcgtatatctaatgttcggaattgcaccacaatgccttgggctacgatatccatagtaattgtaagtttctcgcaacttcccactccatctattgataccaattttatattgcttctcaatatggcgccaggcagccaatggcccccgctgtcaggggcttgagacaattctgcacctaacactaacaagcgcatactcgactccaagtatgatgtatgccagttactgaaccatatcagtaactctctcaaagtcctcaggccggtgttggaatacctgaaatctgttcagggactcatccccgatctcatcaagaacccggtgggctaggatagcagcaatcaacaattcggcctgatcaaccagcgagctccatgacctgcaatttcactcaggagccgtgcgtgaaacgattcgtcgcctatacactcccccggcacctgctgtaagcaatacagaaattcagacgattggataccattgattgtttacacatacggttactccgacataagtcatattttataagcacattatccactctattccgcttttgctcttatcttagctctgtggtgcacagattcggacccgctaggtgtagatttcatggtgcagggatcaattttgtgaatcacgtctttgagatcagaccaaaaggcctgagaacgtcgactctttccttttcgagacaatttggacaggtatgacaaaaacaaccttgtctagcgtcgtggtccggcgtcgggttaggctttgagcggcaggcggtagaattaagcataatggagtccgctgatctggtgcgatcgagacttcaaattgaatttgaaagcctcttccggtgggccgaaagtgatcctgcgctttgtgttgtctcaatgatgccacgccgtctcgtgtagactgcatagtgattaattaatggcaaccaatgcgagctctttggtgagacatgagaatttcatgagaatttatcttttctgttcccttgtgagccacagtcggggcgccgccgaaccttgggtggattggagacaacggtctgtgtatggcacacattttacccccaccagacgggatcgtccaggattgccgtacggctgaactatgactttcaaggctaatcattgtcatgtgggtcaggactcgagaagttatttgatccggtaagccggtccgtatactccgaaacacccctcagtaagtgcagtatgggcttgctagatcctgtaaagcatttatcttctaggctattagatggctgatatctaccatcctaagcaaccttatgaagttcttatgcttctgtcgagatagcaccttagtgagtctatcggtaaccatactcgcttagcaacccattttaccttaatgcgtccctctctaacctcttatagtagcgataaatatccatatatcgaagcttcgttttatatgctataccctcactttttaataggtttatagtcctctcgtcattatatataactaatagtaaaggtatatgaggggataaagctatggtattaagtgttacgatctggcggctaggagccgtcagtgtgacgatctgggaagggtcgtacttaccagacaggcaggaacgaccacgccctcgccctcgcaccttcccagaacaaacgagattaagcgagacaattgcgagttttgcatcgaatacaaactcaaaagctagtagaagatggttgctacttttctattctataacctttatattcaaaagccgtatggtagtagctagtagctaaggtctctatgaagctctatagtttagagctaatgatatttctacttaaggaggacctatccgaagggaaagtctttcaaagactttatgctcttcctggtatttttcgatgtggcaaccataggtgaggatgcgtggcggatgacgaccgcgtgcttctccgtagaacaggatctcattccaggaagggatataacgagaaaacaggcgctctaggtgagcatatagatttcggtggctgtgtgggtgtagattattgacataagaggtgatgcgaacatcgggtgtgtcatgaggcgaggaagtaaattgtacctcccatggcagccactgaaatcgattggaccaacaactcttctgttcatccctgtgacgcgtatcatggcgccggggcctattatggcgcctacgcgtttgttcaaggggatggaccggcagctctttcgcagtctgtccggtcaaatgccaggggtcatcaagagatacctgtccgccttcgaccaaccccggggaccggtcatagacaagggggaactcggatggatctaccagaggagagtcgtgactggcttgcgttcctaatcgggctacctctgtcttaatatccttttgcggcagtggcacattagcctggcatacagcagaagagctgtcaaatactagcaaacggccagtttcttgccaggtctgcgccttgtcccgtagctctgcgatgcaccaatcccaggctggtgcactgataagagactcttcacttgctactgcctcttggtgccattgcgcgagccgaggttcatccggatccagcagcgcttggtcccacccgggctgttccgttatatgttgcataagtcggatcatggtcatctcgcgctttgtcaaccggggcgaatggcgatattcaattagcgcatgggcaaagcgggtcgcggtggggagctcatagtccaagggaatggagccaaatccagggacctggagtggaccatcggtgttgttgagacttgacattattgagctttctgttctgttgaaggcagggctctcataactatataaagagagaagaaggcaagagaggcaaacaagtctagccctgacatttcctaatcggattttatcgccgtgcggggtgacatatgagtggactagacgacctcgggaataatatacagatactaatcgcgatagagatattacacagtaaatcagaaagccacatttcaaatctaagctacccaatcgctctgtagctttcaaggctcctcaatgaatcggactgcgtgcggatactctgtatggtcatcatatggttccggattcttgttgggcaaaatccgcaaatgattcctactgatcctgctctgttgctccatacttcaaagtagtttgcaccgctggttgttgccagtcgatgtcttggaatgagaccaactcatcctccaacacaacagttcgctccgcaatcaccgcaccgacgtaatatgcacgaagtgaatttttcttgtcttgagattgtcctgcctgcgctctgcgtgaccatacactagcgctgtcttggcttggagcaagaagatcccccgctggaatagttaggcggttgtcgcgcgttgatcaggatgttggtcgcccaggagcaaactgtgccgttgctcgtcatctgagaccaaattttcgtagattatatttattatacccccgtccagtcgttgcatcggccagctcttgtaaatcttcaggcccagtggtcgatcctagctcgttgtccttgagtaggaatcggaatcataatcggtctcgatgctataaatgaactccaagaaagtgcagacaggaccagacttcaggatgcactcagtgcatagtgtgtgaagatctccattgatagagacgttgatagagacgttggccaagtaaccctaataaaagtaaatcacttcgtagttatacgtgagctaggagcctaccacaacaatgcgggaaaggatcggaaaggatccaatgaaacgtaagcgaggctcttattttggcagagttgagagagatatatgtatgttttcgagaatcaatgacgatctacaatgagcaagacgtaaagagtaataaaagtgtggattcagtattggatactggacttcatggcctaatatataacaagtgtaaggagggataatatcggccgcaatcacagccaaattatcccgtatcgaaaaacagaagtctcgcttctaaggttcaatggtctttgttagtacgttacagcaaggcttggttagtacttcggcgacaatctgatataaaccgttgatattggtggtgatactagattgttaactagatattagttttgtcattttccctttatctagatataggattcaaagattacctgccctcctatgggtgactagccaaatgcctaccgacgattgcctcctataagcctgagtacgatcggtatttcagaggccaattttcaaaccgcaagccgtgattgtcgaccaagccacactatccactgcccgtaagctgacggtcttcaagcgaaagaagcatgtggaggaaatcgttctaacaacgacaaagaaattttgcgaaagtgcgaattaaagcgccaacgcaccgacggacacattgagcctcgatcatggggacaatctaatgaagcagagtccaaaagagaaatacagtcggaagaagcgaggatataaagccctactggaatcctaaaaaagatcaactctcctcagtgtgccgatcccgtcactcgaaacgagatgcagtataccgccgtggttcgtgtcggtaagtgacgagctccatagctccctagatatctagaaggatatgaatggcgagatatacttgcaggacactaagaaggctgaaatattggatatcgatgacttgtgtatcaaaacttctggtaacgctaaaatgagaacaacaaatgcctaatcccacgcagagatgaagaccgtcttcattaatccttctccatcttcgaaagtccaccacggctacgccgaatgcgttcatcgagagtatcctcctgcacccgtttattgacatcagacatgaacctgccccggtctgaacgctgccgatcatcagcctcccgctgctcttcttccttggcagagatctctgcgagtcgccggcgtcgctctgattcgatttctgtggcattgtattgcatctctgccaatttacgacggcgctcttcttcaagttccttgggatcgggcttgttcgttggggtacgggtcgagggtggccccatggcgcccctggcagagtcgcgccgattgttgtattcgcgtcgggggaagtcacgactccgatcttcgtcggcggcggggcgttctttgcgatcgctagaaggccgaggagatcgagagttccgggatggtgagcggtctcgtccacctctgtcttcgcgatcttggtgtcggctggagtgggagtctctcttgtcatggtagtcgcgacggtctcggccccggtctctatcgtcccggcgagaacggttctcgtcgctcctgcgatcacggttgtctgggcggtattcgtcgtcgcggcgttcacggtcacggtcacttcggtgtctgcgcgaagaccgatctggcgaagcgggtgatctagatcggtgtcgtcgaggtgaagaccgtcggtggtggcgctcacggcgctcgtcaccggcatcatcactatagcgcctgcgctttgagtcgtgggtacgatggcgacgatcacgatcctttccccgatcgcgatctccgcgttccttctctctttccttgcgcctgagagtctctttcaccatcgcctcataggccgcttgttctctcttcttcacttcgagtagcgggtccgccataaccttcgacatggtgtcgcgcgccgagacaatagatggaccggccgcggaaccattacccaccacctccgaacccttctccagcttcttagtgtccggatctttcttcaggaggactccatcgatgcggcgctttcccagcagatatccctccatctcctccgagtagtgcccggtctcgcccgagggtgcttggtacatccagtcgactcgactgtgttgctttgcttttccggaggcttcttggaggcgttgaatctcctccatctggcgctcctcctctctttcacgctgtagttgcgcaatctttttgcgctcgtcgagagcgcgcttctcttccagccatacacgctcctggttcttgatcaagcctggatgccatgacctggttggacggttagcgttatgcttctctcttgaagtaggtattgaagccggaacaaggtacttacttcttaaggttcaaatctccacccatgatgcctggaaataggaggaatagaatgtaaaggagcttggtatgagcaagttgttgtccgagggtccacgggtaaatctaaagccttaatcgccaccaatcacgtgatctagaaatacgatacactctgatatggagtgtgttaactatgtgatacattgaatgtgtcgaataaaacgggaataataaaatgaatatcttctattttcctctttcatagtcgggatatcagtatggcctcaaataactaccaatggggcagaattaaccataaagcagaaacattagagatgtagtagaagaagttgagaataaaaacgcgaaaatagcaaatgacgggggttggttctaaatacaagatgaagaaccgaaagaaaacgcatcatatcatatcgtcatcgccatcgccatagaactccaagagcaaagccggattaccagaaactacaccatccaatccaatgttgacagatattctcaacattggttgcctgcgcaatgagcttgtccacctggtcgctgacacttagctcttcgctatttcggaagtctcgtccagtgagcttctccttgactcgggcgagaacctggagagcacgggcattctgtgcctcgcgggcttcttgtggaacgccttcgggagcatcgagaataccaccttcaagtatggatgggcggcggcgacgggagaattcgcccggcggctgcgcaccgggttcgaaattgacaccgtccatgatagactggcgacgatccgcggtgagagaaactcggtctggggatgagtcttgtgcacccagacgccagttaattagagggtcgtggatgaactagaagagttaaagttagtgtggttcgagaacatccagaaatcaggtacttacagcctccaaaaccgccatcaaggaatctttatgctctcgtagaacacgcatgacagcctcacaagtgatgcggtagctaccctcaatgttgctgacttccatggcgaatgtcaacatgcgagtaagtcggaacggaactcgctccgggtacttctctcggtgcatcgcgatctcgaaacaatcaccgaagtcgatgtgaaccacacggccattaccacgatccagcaacaagttcgatggatgtctgtctcccagaccgaggatgtagcccaccatagacataacaccaagcgatcgagtgtaattcgtacggcgctcgagccatgcctcggagctcttgctcttgagccatagcacacggtacagatctttgccggtcgtattgtccatagcgtaaccgaagacttcaaccttctgcataagggtaaggctatcgtagtcgggtgccatttgtagcatgatccggtgctcaatattgagcagaatccgacggctttcacggtattccttgatcaaggcatggaatgtatcgctgttggatacccatcccagaagaccagagctctgagacaatggaatagcagggaagcgctgaaccgacaggtgtcgcttgaaactctcgctatcgttgtccagcaaggtattgcacaaaccgaaaagttgcatgactcgctcatcttgtcggatatcttcatgacccttgacaaggtacatgtaagagctaccgttgctgcccttgagcgtcatacgacgcggtcgtttctttgtctgcaagacatgcaagatggggtcaaagctcataattcgaataactggcttaccactctggtatgttcctggaacggcaagatcaaggtctgagcaatccttgagtcgaggagacacgtatttcagatccagagttgatagctgcggcagttgtcggctgatcttgcggaatacggtgtaatacaggtcccaagcttggttgagatcgccgatttcatctgattcgcgaaacatcatgcagtagtgcttggcttcagccaaatcacgaccgaaagcttgcgcaaatgacacctcacgaagggtctcagcgcccttgtctagcatatcatggaagggggcaagtgttgcgaacatgccgtcaacatcgttatcaccgaaatagagacgggaggcttcttccagaccttcatgccaaagctcatgccacagcaccgcaacccggataagctcatgactgacaaggtctgcttgctcgaccagcttggcgctatgttggcgcatactttccatgatgttgctagcagattgagagcgtcgggtcacgttcgatttcattgctaccgtcagtggatacacaagggcttgaggatgcgctttgccaacctcggcaagcaacctgtgaactgcaccgcggactctgatattgggctgattgattcgagcgataagttgaggagtgacagcaagccaagtgtcaatattgacagccgtaaatccttccgtaacgacggtattcacctcatgatctccgccatgattaaaccacagagtgagtaaccttaaagtgtcttgcaacgaagacgtcaaggacaaagcgatggagcgaatgaatccgcgaattgcaggaatcacatgttctgtaacgatatgagcaggaacagccccaggcataccctcacggctagcctggtttgaaatcgttgtaacaacttcgaagtttgcaagtgcccaggagtgccacgccttgtatgaatcgcggttgtattgggtcgccgctgagtaggcattgagaacctctcgaacgtgttctggcctccagtcacccctctgtagggtggtctgccactctccctgcctcagataactcttggagagaagttttctaaatttgttggcatcaccaatccgttcgttcaggctgatggcgtctggatggttctgatcgacgaccccgttggctccattcgcagcatttgataccatgagtgtgttgtatcgagaaaaatcatcggtcaggccagaggtaaattctttcatcatttcaagagattctagttggtgaccgtttgcccaactgaatttcagcctggcgtatgtgacttcgggtggtgcgatagtgcgcgttccattggcatcagacaccactgtctctagagatgcaagggaccgttccgcaagacccatgcggttggacttgcgacaaagattggcgaacttgatggacatatcaagattctcacgtggagcagtgacaagagctctgaccttgagcatacgctgccacacttccacgttttgctgacatccgagcaatctttgattccaagttttacgcatggcatcttgcttttcggggtcgccgacgttttgcttgtatgtgatgatctcttccagctcagcgagcatctggacccggacaacaacgttgtacgcacggttgtatgactctccgagaagagctgacaattcagtatcgagaccattccgagccttctcaatgtacatgttggcttcttcgaattgattgcgatggattgccagaatggcaccgaagaatgagcggtccggggactgctctttcatgacaccaaggtaagagtccatcaactcccactggcctcgaccccaagcagcggcagcagcgagaggtgcaatagctcgtcgatgttccagtgatgcttggttccacttttcttgagcgagatccgagagaactttccactcgccaagagcgtgcaaacaccgcattttacccattgtgataccaaatgagtccgggtccgtcttctcgcgtcgcttgtaagcagcaagggcttcgtcccaccgttgaagcttctcgaaccacgtttccttgagctccacatcacgatacgcctgcgctttgcgaaggataccaatggcagcgtcagactgctgaagctggttgttaatggtaattaaggcttcaaccgcacccgagttctgatcttgctcgaactcgagttctttgtagtgaagagctttagcaaaagcatgacactttgcagcatacttcccaagagtgcggatgtcgatgggaagagccttgtcatcgtgctccatgaattcggccaaattgaggagaatttgcaaaatctctggggagatgttgggagaggtaagcgccttttcgattgagcggacgagctcttcttggtattgatcatacaactcagtccaacacgaaacgaaggcagcattgaaaaggtcccttgaaagcggctggtagattccggccaagctagcacatgcacgcaatgccggggacggggattccttcaacagctcaatgctgaaacggcgtatccattcctgccaatcatcacgagtggacttctgcgaagcatcccacgcattcttgagatgttgctgattcacaacaatctttttttgtccaatctcggaaaaattggtatcgtccgtggggaaagtatagacctcttctggattgagatcctgcggaagtgggtcgcccttctggagtttcgtcaccaggatctggtagttcacatgcacgatctgattggttttgaggaccttgttgagaagatgaatgtaatgggtgaagtcctgtcccagctggaaaatgagagcacaaatgcagtccatcgcggcttgacgcagcacacgatcaccgctagccacgacccgtgatagagaatgaaccattagggatgcaaagtcagagacattgacttgccgcgataattttgtcaagctatcaatagccgatttgcggatgctctgaggattttgtggccgatcgaacaaacggacaatggaaggaatgatgagatgcatgtattcctctccacttgtgccgaatatcaaaagagcatggagaatcttctcggagggctgtcgacgaggcgaggtgtctttatcaagcgtatcgagcatcaaagggatcaggccagcaagatacttcctgaattctccttccagcgacctagcaattgcctcgaccaaggaaataatcgtaccctggatttgatatgaagcatcccagaagtctctaataacctcgattatctctggcaagaaagtacgaatatgctgtcgcacgatattcaccaggattgccatctgattgaaatagggctcaagacggctagcaggagcgcttcttatgaccaagatgaaccctggaataatttgtccaaggaatgggacacacttcagacccagagtcttgaaaattgtgacgatggcatcaatgacggctgagtgatattgcgccagggagttttcccgcaaaatgttctgcatcaaagtatggattaccactgtgggataatactcctcattggagggcgtgaggccctgcataatgagggcaacatcagaaacattttgtatttcgttgatatggtgtacgtcaggttcaatctcgctgatctgttggtacttgtaggggtcgagggcaccgaggactccgagaagcttgatggtctccttgcgtagagagcctgtctgttccgttttgatgatgttgatgagcactccgagaagatgggggtattccatgtatggctcgataacatagcctgaattactggccagctgtcctaatgtccgaagcgcagcttcacgtttgttatgcgacgaaaggtcctggagtgagtccagaataattggcataatctgcggcaaatattgtctcatctcatggccgccgacattggcgagctcaccgactgccttcaaagtagtggcagcaacaccgggattaatgtctgttgttttgggcaacaatgcggtcaccatgggatcaacatatgacctgatcaatttcgtcgcattcgagacaaacaagctgatgagttgagccgtttcctccttctgccgggcagtatttgcgaagccaaggccagtgagaagattgaccagcagttttcggagtggcgggaagacataagcagggttaacgctggaaagtcgaccgataatgcagattgcggcttctttgacatcgaaaacctcatcattgactgctaagaacaaacatcgaatattctctggtcgtgccaagtgccgatcaaatttgcggtctaatgaccacaagacagtgcgccggatttcaggatcagggtctccgatacccacagtcaacagcttatcaataacctcgctgacaacttgaatagagtgtccactggtttgattgatgatcggatcgtgaacgaacagctgacagcatgtaagagcggatgcctttcgaatctcgggattatcattttccacgtagttgatagcgacatcacgcacgaactcgtttaatatgtgcccagagaaatcaaagctgcccagtgtgtgaagtgccaatgcgatatcagaatcggagtgaagctcattgggtgcaaagtcttttgcgaatgatggcataggaggcagtcggttttcaggacacccgaggggccggaatggcgttccacaaaggatgatactcaacatatcaagaagcttttcctggatcataggtttgatgggaggaatgtaatgggccatgtcgaccagagcctgtgttaatgatttgctcagtccacaggcgaaaatgggatccaggagagcttccatgtatttgctgagcgcctgtcccactgcgagggacagcatgctgatgcactcaaacatcggcgcctcgttaactcctgaccgattcctcgccttcattgcaagcccctctcgaatgtagatgatgatgccgtcgagatattggccgatagcggtgcccactgcattggcaatctttccaatggcgatgaaggcagagttcctctctttgtctctcttgagttgcgcttggaggtagaccatgaatttgtgtagatagatctcagtgaaatcggtgggtgcatatgaggcaagaatgggaatagtgaggacgacttcggtgcgaatcttcgggtcgcgatggtccttgagacgaaggatgatttcgcaagcatcccgataatgttctttcatgaacatcgtgcccttcaagatcaactctttgatgatcaaaatggagccatggatccagtcgacgttatgggacttcaagcccagaagtgcttcgtcgtgtatccgtgcaaaccatgattgacggacttgagaatcgcgagccacgattatctcaaagcattccccgacggcctcggcggcggtctcgcggatgagtacttttgggtctcgaagggcgacccaaacaagctcaaaaacctgcggaacgaagccgtagaggagtgttggtgagcccttggccagttccctgattacaagaactgcagcaaaccgccgactttcctggcgctccgattgtagccattctaatgcggattgtatttcgctttcgaccagttctgcggttagagccccgcctggcttcgcgagtcggcccagcgatcgggccgcgtacaccaggaccgcgttatcattgctgcgaagggcgctgcgcaagtaactggcaaatctggtcgttttctgagccgcatcaactccgtcaaagtcaatgagccgatcgagtgctaacaagccaccgattctttcgtttgcgtcgctgccgttgaccacgagttgagcgatacgttggctaacagcgttgtaaaattccacgaacttctccgatggccagtctgcacaaggaaatatgttagctagtaagatgtcttggaattcaaccgttaatacctctagacacggagaggacgttctcgtagagctcgtatgcagctctggccctggcctcctcattctttgacttgagctccacgaacaacctttgggtcacgtctgagattgcgcctgcttgggccatatttgcaaatcacaccccagggtggacattggaatacaaggtctaggccataaaataagaagacgcggagcgcataaagttggatggtagagggagggtcatgtgtgaggcttggagaaggtcgatgggtgcacggaccacgtttggagttcccgactctctgtgcgactctgacaccctcggccatctacaaccactctataagtaatcactacgaactatcttggtgtttattttgaatttagtgcttggtatactatagatgactcccggtgtttgaaatttgatatgtctgaaaagtcatcttatcctcaggaaatacgtcacgtcgcttcaggttctaacatttgtgcgtgctcgatcatatagaaagacgacccaaaaggcatctagtgctgaatgcttgtcttcaagataaagtcaaagacagaggccatataagcaaccgacttcttatcattgagattttacggcgcacaggtttgcttgcatctataagtgggacataccttgttcaatctttttgtcaaggtggattcagcctcgcgataggacaaatactcaagtgtttggtatctttaagcaaaattgcttggtcttaagcttctagcataattacatagtgtcagttactatgcgataaatcaccttgactcgtactactaccatattactcgatgtaatccgcctgcatgctatccgattaatcgatgcccggactagcacctaaatggactcgaactccttggaaatttttggtgctttacacttagatactgcaaaattacttcagatcaccataaatttatgtaaaggtgtttgcttttgcacgttaaacggggtacccatttggatcttccaaggttggccagggtaaggtcgacgccacgagcgggctggtttgatgactaagacctggcgagccctggcctgcccacattttgatccatcaacttcgctgtcccgacaacgcctcccatggccagaaatgaaaaatgtcttcgcgggactccagctcctctagtggaacaaataagtttgcattcgtgacagggaacattcattcagaagctcggagccatgctatgaaggaacactggaagcggcgacatcagcgcaataaagaggcaaaagcatatcaccagagaaattcatcgcgaaatttgcctctccgttcaaagaaccgcgctagtgaagatgcgagtacatcttcagggttgccagaggttggggatatggacattggcaggaatcaagaggaatctactagcatttccgcccagctgctatgtggtctgagttctgcgctgtcaatctcgaggcctgatccgttccagacgtgtcctgttcacctgacgagccagcaccaaaagcttttgcatcactgtgcgcatgaggatttcagaccttgctatatgtggaaatcttgctgacgggggtcgtagggataagcactcatgcggctatgatgtttgcagacctgaatgtcactgagttcaatccgatgaaagatgtttggttcccgctggacctctcaaatgaatcgtctttcaactgcatcatggcgcattcagctgcgcacttatatcatttatacgctggaactcccccgcgacgagggtcgaaatcgtttgatgccttgaaatataagatcgaggctgtcaggatactacgcttttggcttagtgatcccaagaaggagctaagcgatgacgcttttgctgctgtggttcgtctgcttacattcgaggtgtgtcaactaatagcaatatcctctgtgtgagactagctgatcgcatttgacctagcgatactggggcacggtggaagattggaaaatccaccgtgatggcttacaaagaatgatcgacgccaaaggaggagttgaagcgctccacagaaattggcggttgcaacttgtggtttacctgttagtgcagatggtcaaaagtataaagaagttgcgatactgaatatttgcagtgtttcgttaatgtcacgaccgtcatggctcgagtccacgaacaacctcgaacgactctctcgtcctcttttatcgcccaacgctacgcaaaaccccttatcttgcgatgttcaaaaggtccgctgcctttggctgatatcattcatccaagatatgagaacattcatgggatcagtctacactagagggctctctgcgtatcccttcactcatgccgccgtaggcctgttgcgtgagaattttctgctctctattgatccttctacccatgagtatcacaatacagagtgggaagacgaaatgctatggtgtttattttgcattagtgtcctaatgcaggagtcaatttccgccctgtcagatcaggatttaacagcatccaatggaccgagcacactacaaggattggagatatccctaaggcactctcatcatatgtgggggcgctcaatccaccacttgcgctctatcttatacgaaagcctgacaaggctcgttgaggaagggcaatacaagatgaattattttatggacctggtgcaggttctgggaaccttgagtttggaagcgcgccaaggagtcgagaaatgtcttctcaatttgctttactgcctggggaataacaaaaccagcgcgctattcgttgaagatggatggtcgccggattcgcttctgtcgtcaatgcgcgggcgttagagtatgcagctggatttattattatatgtaagtacatcacgaacgttagaaatagaataagcagggcggagtcatgaagggttctttcagtaatatccttcgaagcaagagaactgcatcaaagctccaaagttcggaccgtcctcttcgagatgctcatcttcaacgtattctttgaggctttcgtcgtctttcttcagatcggggcggaaccctctctcgtcgcccgtacttgtcctcggtcggctggccctcgttttcatggtcgttttgctgtgaccgttatggtcgctcgggttcttaccacaaaaacactccttgtgcttggtgggctgctgagtattaatcatcatatctcggcttagcatttcaggatggaagactgaatgagtggccgaatcacgaaccgtgtggctattaactattctgtcagaatctaggatgaattcatccctgatacagatgggtcacgtgattgaccaggctggttttactgcagaaagaccaactcagtggtttttcgcctttcatttcattttgtttgtttttgattactccagtaatgatcattccaagccacaattactaacaaacattcgaataagcttagtcttacttatatctgtaatgaaaagcatagttgccatactgtcaatttgatagagagtcaatttgatagatacaagtccacatgtgcctaattcatcaccctaaaacacccaaaattatatggcctaagtccacccgaaatgacttatttgtacaagtcagaatggtcacgcttaatagcatcggcacccttctccgcaatcatgtaaacggagttctgaatccgacagtcgggaatgacagggatacaagacgcgtcgattacacgaaggttcttgatgccgtgaaccttgaggccgggatccaccacaccttgttggatgttcttggacaggcgggcggtgccgcaaggatggaatgaggtctgggagcgatcgagcacgactctcttcatgagcttgtcatcgtgcagcggcatcggccaggggtactcgtcctcaacgatgtccttgaagccctcgccattgagaaggatatcataggcataccggataccctcgcgaatggcaataatgtcgaggtcattgttgaagtagttcagattgatattggcttgctgcagggggtcgctgctgtggagcgtaaccgtgccgccttcagagacagggcggacaagatccaccataaccgtgatatagttgcccttactaggggtaggatagtgccactggaaggcactgccaaagagacagacaaagtcaagttcgaaatgaggctggccgtatggacagaacggatccttgttatcgttggcggctttcgcttcacggtacaggggatccttctccaggtacttgtcaattcgggggaacccaaccatttcaaggaatccggagcccaatggaccaccatgactgttttcgtaggcttgaatggctctatcgttgtgtggggttcctttccgtaagataaaatcgtccataccgaagccatctttgagacgaagaacgaaaggaacaccggggtgatccaggagatgctgcccgacatgagggctatcaagaatcaccgggataccgtgcttcttgagttccgcagaaggtccaataccactgagcatcaacagcttaggagtctcgaagacaccttcggagacaataacttcacgggtagcaaagagattaagctcctgaccagagcccaagataacagtaacacccttgcatgtcttgtccgcagcatcgataataaggttcttcgaatgcgcttgaggaagaatagtgacgtttggcttatcggcaatacacaggaagctgccagagcgacgacccttgtagattgtgttgacactatgagtcaggccggacatagtaccgtcgaaaatattctcggttactggatgaccagtggatttccatgccttggtgagaaggtctctgaaaggcttcatctcggggatgagttccgagtgggcaatcgggatcggaccgttactgccaatcttcttcagctcaggcgagtaggcatttgcatcgtcgtggtaggtgacactctttcgcaggtagggaacaagcggatcccaagtccactcttttccgccatactcctcccacatatcaaaagttccctttgacccaggtgcccaggtgaagtagttcaaggaggaactgccgccgaggacctttccgcgcgtgttgggcttctcgatgcgctcatagtcatctcgcttgaccattgttgttttgaacgcccagtcatactcgctatcgcgaagttccatcgcgttagaaggaactcggatcgcttcaaggtccttggcgttctcgacgccggcttcaacgactaggattctagcattggggttctcagccaggcgaccggcaacgacgttgccagctgtgcctccaccgacgacgatgaagtcgaacctggcattgtcctggacaacagtcatgttgagaagtgaaaaaggttgagaagttgtaaggaagtgaattatctgaaaaaggtgatctgtctgcggagtgagcgacttcgagacgccttttatatctgacaggttgggcttttcgggatgaggagaacgtctttcatgagataaccagcgcatgcattcctcttcctaatacctcatgtggcgtcattgatttgagtagagcaaaaaacacgcggttccacagacaagggcactgtattgtttactactggtcttacgggcacctagctgaggaaggtcttactagtgctgagccaagtgatccacccatattttacggccagtgttctgatggtcatcctagagtttacgacgtggcaatggctcataccgacctgtctcgatcatgtctaacttcgtttactacttttcgtatggtcatcttagagttttcagtgtggccatggcttgtaccgatctggctcgaccatgtcgagatgtcacaggatctgcattatagacattcggcggatatattggcttgacctagtggatagaagcgaaaagctagcttctctatccacgggatggttctgacggaatgtggggttggatagatacatagatagtagatcaggatgatcgcacctttgagcagcttaggtggagctccaccagatgaagtgggccatttgttgttgcacgttgggcggccgatccatgggttggctagatactcaattgagtttcggtttgagacacgcgaaaagtgaattgtcaagctggtggaatccagatgcacagctgcaggagaactagggctagatggctttatgcctgcttgacaaagctggtcgcaggtctgaatgagaacgtgagagtctgaaaactagtattttagtttcgggaggtcaagaatctagcacttagcaggagtggcgggcttcggatacggcatgcatgaatactcctatgctaccctaaaccgatgaggcaatagcattcgaccagttatatatcggtatataactagtgattttcccactacccaatcaaggcagaaaagcctctgttgggagtagaggagtagaattcaggagtagcgggcttgatgtacggtatggacactcctatgctacccaggatcaatgaagcaatagcattcgaccaatcatatatcgacatgagtttggtgattttcccactacccaatcgaggtagaaaagcctctgttgggagaagaggagtagaattcagcacttgggtcttgtcttaattcgtgcggagaactgcgtcaggttctagtgtctgcataaattggggtctcggttgagcggaaaactgaagttcagtcaagagtggatctatcggtttcaaggcatacgttagcttctttaggaaatgctagtcgacaaataacaatcgtgtcgtattgtagtgacgtaattatgcgggtccctgaagcttgtacagagtacctgggaccagatacagatatgatgtacaaccaaacacagtactcccgagatgacagtcccactagttgtagatctgacacttcagaggcctggaacggcagataatcgggttgagcttgaatttagcggtagctgaaagcggtaatttcgtcagaggtagatatcttactgagtataattgaccactgagatggcggaagaaaatacagtgctaatcaagatgtcctgaatggtcagtacatgtataatggaagcgtcattaacgttggggaggaatggcggaataataaagcagttcactaagaagttcattagcttaaattggagagccctggctgctttgttctgttacatttcccttcacatatcgtttgccccaacatttaccatgtctgccgaaaattattatactcttgcggaaggtcagcttttttggggggcatggggggattagcaatcctacaagtactaattctggaacaggatgccccttcgctagcaacaacaccgcgctcttgatgcggaatcgtccaggaactggcggtctaggtctgctccaagacactcagctcattgagacactcgcgcacttcaatcgcgagagaatccccgagcggtatgagccggtctatctactctacaatattgatcttaaactaattggcgttgtagcgttgttcatgcaaaggccgttgggtaggtgaaattgggtggttgaaagttggtttgcaacaggtcgctgactctcgctcctattgtagcgcatatggagaatttgaagctaccgaggactgctccaacctgacctccgcgagcttcctcagcaaagttggaaagaagacccctattctccttcgtgtttccaccgtcggtccggaatcgggctctgcggatacttcgcgagacgttcatggatgggcgatgaagatgtacaccgacgaaggaaaccttgactgggtcttcaacaatacggtgagtaacttcatggtcctatactaaggtaaaagggctaaccaaaatttcaagcctgtgttctttattcgggatcccatcaagtttccctctgtgaatcgctcccacaagaggaatccccaaacccatttgcccgatccaaacatggtaagtctccaattttgatcaccagacaatccaacaatgaattaacatagatttagttttgggagtaagtcccttagatacaagcttgattttctgcattaatgacatgctttagcttccacgtcgggaacccggaaggcatccatcaacttttgattcttttcagtgacagaggaaccccacgatcagttcgatttctcaattcatacagtggacatacatacaagttcacaaaggcggtaaggacgacagccttggtgacgattacttatcgctaactggctaggatggttcattcaattacatcaaagtccatatgaagacgcgacagggcgtgaggaatttcacacaagaggaagcaactcgtgtcgcaggagaggaccctgattatatgatcagagacatgttcgacgccattgaacgaaaggacttcccgcagtgggatgtttttgtgcaagtaatgagcccttccgaagccgaaacctatcgctggaatatcttcgacatgaccaaagtctggcccaagaaggacttcccattgaggaagattggtaaaatgactttgaatcgcaatgtgagctatggctctctcctgaaattgatgcttattctaactatttagcccgacaactattttaccgacatcgaacaggccgctttctcgccttccactatggttcccggatttgcagcttccgctgatcctggtaagctacatctccaatgttcattgaatgacctgtggttgattcccgaatctagtcctccaagcccgtttgtttgcgtaccccgatgcagctcgataccgtcttggtgtcaactaccaacagctccccaccaattctgccaaagtccctgtttactgtccattcgaacgagatggagcaatgcgattcgataaaaattacggtgctgaccccaattacgttggatctaccctgcagccaacgcagttcaagactaaagaaaacggtgttaccgctcagtcactcagcgtccataccgaccacgagaaatgggctggcgaagtgtcagcctacactagtcagattactgacgatgatttcgttcagcctgcagctttgtgggaaatccttgggcgcgagccagggcaccaggacagggtcatccataaccttgcaggaaatatcagtggggttacgtcacccaatttacgcgagggtgtttacggttcgtttgtcttgtatcgctttcaacttatggcttttacttactctgaactctttgcagcacttttcggtcgtgtcaatcaagaactcggggctaagcttcgaaaagcgacggaggccaaggttaagaactgaatggctcgctgtctgtccagtatggtgaggaaagaatatattgcaagggaaagaaaaagagaaaatctgatgtcttgaatatctatcaaaaattatcgcaagttatgctcaatttactgtatttccacgagaccaatgttcaaccatcgtagtaccacacacttccccagctgcaccaccgacggaaagcacgcttccctcatagtctggccacaaaaattgatacatacagactttatgcatactcaccacatggtatgaatccagctatgcagttgtacagttaaaagacagatcgttgacttttgaatctgatctgatgcacgcatacaatctacgagtctggagaaggcggatgatcaaccaatgcgaaactgtaagatagattggaacctcggaagactagctgcttccctgaagctctctagatagctttatataaacaaaagcaccaagatcatctcctctggaagccaggtaatttccaattgaactgcttctcccctgcatgtggtgtctttgatttgtgcataaggacataagcatccatagttaaattttttcgataagcagaggaagaagcaacaataatacgtaaataacattgcagaaggatggagaaaggaagctaccaatcaggggcattgcaagcctttatttctcaaggatagtgcagactacaccgatcaagcacctgacattattctcatcttactgcagtgtttataactaggcataaggatttccgagaataattgaatcttcaagtgtcatttgaatagtcagaaaaaaaaaacagctaaggaatccagcgagcaatagaatcacatcaagcctccataggtctggccctcggcttccaactccttgtccttctcgtagtagtctttgagggctttctcatccttcttcaggtagtcgtcgtagaatttcggtttatccttcttgttcgacggtccattttgcttatcagagtgggcgtcttcttcctgattgtgcttatgatgatgatgctcgaaaatcctctcgatgagaggttctttgtccttgacaggatgctgagagtctgctttgcttttgttagccccgcaagaagtcatgcattaagcaaggcggcaaaccttcaggcatgttgatatttggtgggaaatagcttggtcactttgcgatttggcaaggaaatgagttgtacaatcctgtggaacgatatataaatcacaagaagcacctcttagctttgacatttctctctggccgaccgagcttcaatgacgtggatgacctcaaaacgagctgatcccaaacattcctatacgggaagtgaggtgtgaccgcattttgagtttctatttgttgtccgatcgtggaacaactacctaactagcggacgaatgctttacaattattgtcgggtctcgaattgcgggtaaccaacagcttagtgcaatctagtagctcaactctaaatcccttgggacgccgtcggttcactgagaattcacattctctgctttcatgcccgcttttgagcaaacaacatggagcgttggtggattctgcctgggtgtaaacgtcatttagactcgtgtttgaagttagtatggggatgactgttttgacctgtctaggtttctcctacgcgaacaatagccttccaaacggacaagaaatgacccaggtctgagcccagggaagaattgaacggtcgtaccacaatcatatcgggcagaaggatacaagacgaccccaatcagggcaaacactgccctcaagtaatgccatgtctcactcaagaccgattttgtaacgggcaccagcttttttgcccctgctgggaaggtccaggtgcagaacggcagtagcatttaacgaattaggtttctgcattagtagcaaacacactttattagcagccatattcgatgtacgatagtattagaagtcttgagaacagaattggtgtggacctgcgacgaaataaacgagttgttgatccgcctctctgaatcgggtagtactaattggccaatcagaagacgtatctgccgtatatagcacgcctcccacgccgatccccgagatcagcaaagggtccgtcctactggactagcttggagctcggagtcaagctgctatactaagctttgaaatccaaatcctctgtttgggcggtacagtacagcttcagtccagatttgctatcttcaacctcgatttatcagactcgaaaatatcgacttacctccttatacctggataccgtgacgaattgagcagtgacaacttgtcgtgtttccaagaaatcaacggaaggaccatccatcaaaacgttcaaacgaacaatgagcagcttaaccaccgccagcatccaacccgtcatcgcccccctcacccgaacagcaatctttctcgttttatcaatcacaaacacctcagccattccaaccatccgctcaactcttgccagcgtctcaagcctagccaaaaatgtcgcctttcgagactccgacgctaacttgacctgcacggtgggaatcggcagctccgtctgggacgaactcaccaacaacctcccgcgacccaaagagctccacccctttcgcgaagttaagggtgccaaacacaccgccatctccactccgggagacctcctttttcacattcgctccgaacgccgcgatatctgtttcgagttcgagcgccagcttatagaccacctcggtgactctgtgcagctcgtcgacgaaacagttgggttccgctactttgacagccgcgatctcctcggctttgtcgatgggactgcgaaccccgtgggcccgggcattctaccgtctgtccttgtcacgatggaggacgatccacacgcccaggatggcagctacattgttgtacagaaatacattcacgacctagctagttggaaaacactaccatcagaacaacaagaggagatcattgggcggaccaagatcgataatattgagcttgacgacgctgaggacgggaagcaggcctcgcacaagacgctgaacacgattgaggacgaatacggcgatgagcatgatattttgcgcgataacatgccctttggatccccagcgagtggagagtttgggacttatttcattgggtataccaggcggctatgggtcattgagaagatgcttgagcggatgttcaaggggcatccgcccgggctgcatgatcggttgctggatttttcgaggccgttgacagggaacgttttctttgcgccgtcggctacggtgttgaatgggcttgatggttgatataaatacactgttgttttccgtcaatctcggatagctagatactaaagaactaaatccaatgagtaggtgaagaggaagtgatttattgtactttccggttccctatttcaaatagagagaacttagcattttacaacaagaactagccatgcaccagagaaagatgttttttcaagatgctgctttagtgggaaggcaggatgatttttgaggtctacatgtttccccatacttgctagctaacctacaaaaagtttggtcttgttttgctgctctcgtcttgtctgctttgccaaactgcccatcgtgaatatccctcttcattgtatatatatcaagtactgtcaccatcgtagcttattgctctacttcgccttacttactccgcgtgattcgtaattcatccttgcatggtgctcatattttagtgacgagtcgtaatgggcttgatatccgtttatgttgcggatacccatggcagtagctatgtcgttttcatccatctattttgcacagttcataatattagttgatcacatattttcgctcacgtagacatatacctgcatcaacatcaaatggagattaacgaagagagcggtgcgactattactagatcgaagtgctgactgtcaaacccaagctgaatatcatagaaatgcgttctatgccatagactctgatcagtcatgaaaagatgctactggatcgagaaagcgaaagtcactgttggagatgaggaatctaggccccatccgccctgtattcaacctgtctagcggactcagctcattgtaccttgaacaagtcagagcttatcacctattgtcttggtatttcattcgatgcctttttccgcctactgcagtaagattgctgagcacaaacacgaataaatgatggatgatcggtcaaatacttacgtttcaccgataaacaacgtccttggatggaaagattagcgttgaatactctcttcaacgcgacgtacgtgcataaaaaggctgctgtagttgtcctcccgtgtttgaaacccaataggggcataagggaagttgaaattatactcgcttcgctaaccggaaacgaattacacctgtccagagcaactttcggcaagccatcctaccatatcggaggaaagtccaattcggcccaactgtactgaaagaaagttatggggcaattactgaaacatataaatctgatcgtccgcaagtggaggtacaagtcgctatgctaatatgatatcggtgagccccactcctatatgaggaaatactacccaccaataatgtccatatatttagacaatcattcgttaattagtacttcctagaatggaatagaatgtaagataaagtaatgaattgctccattttagttgcgtactccgaacgaaacgccagttcagttgtttaacaagagtattataattatggtagatgagaattgctcttgttacatagttgagcagctcacagcaattcagcttcaaagtacaaaggaggcatgaggccatggctcagcaattgcatatgctatgggcattaatacaaaggtacacgatgcgatggaggacgtaggtaaattacaaatgacgaggtgcacgtaataaatataaatttccaaaagtagatgacatggcttttgccttacgctgagaaatgagaggtaagggggcttcgtgagttttgagccctaatttgtttcccctgcaccaagaatctcgatctcactgtccacatagtatggagagcgatggattccccaaatgaaaaggaggtaaacccgctcaatactacggaagatgaaatgaataagcgccatgcttctggtgacctagtatcttctgaatcgatactacactccaatcagcctcatttccagttcgtcgaaagcattgaaaagcctgttgcgcgcagtcatgcaatgaagacatattggagacggaagaagggagagcaacaacaggaagaatacttgaaacccaatcaaccgagtttgcgaccgttgcgaccgttatccaaaccgcgagcagtccacgaacctgagacctctaccctgctttcgccaacagaagaggcttcctccggccatgggtatctctcttgttcagtcaaaagtccagaagagcttgggatccctgaccagcttttcgctaacatcagcttcactttcgcctgtgttttgggccaaaaggttgaagcaaactcatttcagatttcagcacatcatcaccggtttttctatcattgtgagtgcgtttttaatacagcagccttactcagcaacatcaaggagactgacagctcgattttcttatttagggctgagcatgcatgcgcatatcatacattcaggacttcaggcgcggacctttactccattcacagagatttggatgccactcgatctatcaaatgctgcatcattcaatggaatcttggctcatgcagctgcagatctcatgagatttgaaggaggtagaagtaatccggagcttctgaaatacaaaacggaagccatcgaaacaatcaataaatggcttggtgatacagtcaacgcgattacggatgatgtttttgctggtgtcgtgcgacttctcacatttgaggtatgctattttccgcagcttgaagaaggtaacggttgatcgtgccaagagtcctgctttatgctgatcacgcacgaatgaaatattcacgggactaagatggttgttatacgcagagacactggggaacacgtgaacgtttcaacatgcacaaacatggacttcagcagatggtacaggccaggggaggttataaagctttcggtccaaactggaggattcagcttgtcctttccctgtaagtcccctatcatgtccataatctcattcgtcatattgcgactaaagtgtcaggctttctattgttgaaataccggaacagtcatcgtctgtgtcgtacttgatggaggaattcgagaatcttgtatacaagatattagatacttcctacttgcctcatcaatccccaaaccagtctcaccacgccaaacaactcacacacctcgcgtcattggcagaagcgataaaggttttgcaacatcgacggacaacagaggacgtcatgcgtggagagacacggcatcaacgggaagcagtctctaaatgtctgcaatgtttactttttatttgggccacgctccaagaaagtgacgagaggagtattgggaatcagtcgaagcaagagaatagtccttcattcgctctcaatacttttcttcatgcgtcacgacatatgtgggccaagtccgaggatgaagtcatgtcaatcatcttggatgacttcgccaaaagaagggaaaatatggagaaaactgtctttgttacgacggtgattgcatgtatcaaaggtattagtcttagagccctatatggggctgaacagtgcctatcgagctattggaactagccaggggatcaaactcctgaccaggcaattagaatactgaaaatgataatttaaaaacccaatcagaaataaattcaaagaccttgagcgaacaacagcagggtccatttaagggacagtcatggacgctttagctcccttataagccgcaagagaacacatggtggtttcggcaattagatattgcgcagtagctagggcactgaccagagatggcgttaaatatacgacagaaatcgccacagatttggagatagtatgtaggcgtgcatagatggtgttcagacttcagcaaagtcctatcttttgatatcaaatagacgactcgatacattttctacacaccgaattgccaacatcaaatagtgcatttgatgtggttgttctttggctgggcctacttcgcacccgttaaccaccactttgcgggtacgaagacccatagcgctcagggttcaaaccccttttaggaagtattttgatgcctgaacggcctaattagcgctactctttaaactgctctgtccaatgtaatataaatgattcatgtattaatgaagcttttggcaccgtacaatcagattagttgattcgtaatcaggatcatctaaatataatagtacctaagatatcccttaagctctttttaccacttagtcttcggttgcgggtggtggctctaattaatcttcttcgaggagacttatcattgtatctgtgctatacacagaggacattgccttccttcataaggacttgcttttctggctgaagttcataccagatgcctggagaagatgatctcggcgaatacaacagaccaagcttatttctcctcgctagtgtgttcgccactgtattgctctgcgtgttgagtgtggctctggcggtgaaccactgtccttgcttaggaagctagcacgacgaacagcatcatccccgacatcatccaaagtacgcaagagtttaccatttagaccatacatgtgggggctgggtgtgaacaagcgataccacattgaagacgttgctagttttgtgtgcttgtgcaaccttcacatccccagctagagatattggtagactcagcagcggaccttgtcaatgagaaatgttttgattggtccgctatacgagaagaggccgccaaacttggtatgtaataaaagcctttttaggctcaccactgtatctcctgctatattttgcataacagaaagggtccaactcgatgatgaatattttgtcacaaaatgattcatgcgtcggtttggctgaaaccaggaagtgaatgactcgacttccaggaacgggacgctgttatgtatgtaaaagtccactaatagaatctttcctcccccaacttccgcacgaattttatgccgatcctgagatattcacttggcctgggccattaatctccacggtaaaagcattcaaatcgtctccggttatgattccaattttaacaaattctactacaaaggatgaaagcaggcctttagaggaaatagagttactgaaggtataaaatcaaagacgagagaaagctgggtctgtctgatagtttagagcgggtgtctgtaagttattatgaagatacaaactgagaagatgcacgctagatatattatgtatctgctcaatagcgaggggaggacggctcttttctaatttttatacgcattcgcactatatttctactccccctttaggaaagtaacgctataagtctaggcccttttgggaaccggggctcatactgtgaaagcccgctactaagctactaagctcgtgagcctccagaactatactattgagcgctacatgccagttcctttcggaagaattgagtacaattgattcaagaattctaagaacgagggaaaggaaacaatctacggccacgactgggttttatactcttcctggcgacctcgccacaagccaagcaaacaccgtcttcgcttacagttttaggaagggacgactcggtctgcaggtacgaggtcgggggcccaggtttggcaggtacgcagtcggtatcagtcggcagatcgtcagatcgtcacattctataacgatctcatccttatcaaactgtagaaggaattcaataaatgcgggaaaggatctcggagattatagaaggagagggacgatggttataggctttataaagccattaaacaagctctttactagatggtaacagaagggtcgacgttctggaaggttaggatcgatcggtgaggcattttgattggtcaaaaattggtcaaaaaagtcgaaaatgacgtaacaaaactattccctcctcagccgctatgtaagtgcttctcgccatctcttcctcgcaaaagctgatgacccacagatgaatatcacccacagtgatccgagggagacttcgttggtccagatgaaacggtacctgtccggtgacctggagcgcgtgggtcagaaggtgcgccaacgcttggagtccagtcggttggcgcgagggctgctgaaagtgatcggtgtgttggccgtcactatggtgctagctgatggcctgctcacaccagcccagtccgttctcggagccgttcaaggcattgaggttgtgcagccgagcatatccaaaggtacaataatcggtatcactgatgccattctcgttgtgctgtttttttattcagccgttgggaatcacgaaattatccttcgcgttctcaccgatcgtgattatatggctcgggtttaatgcggcgttcgggatatacaacctcactaaatacgacgccggggttttccaggcttttaatcccggcctcgcgttcgaattcttgatccgtaacaagacagacggatggaggatgctaggtggtactttgcttgccttcactggtgtggaagccctctttgcggacctgggcgctttcagccgaagcgcgatccagatcagctggctgtgctacacgtttccgtgcctattgttagcatatatcggtcaggcagcgtatatcagcgtccacccagaggcgtattcaaatccctttttcaacgcggccccacctggaaccatctatccagccttggtcatcgcaattctggctgcaattgtcgcctcgtaggctattattaccgcaaccttccaggtgagagagttgcaacccttgatttgggagaaggtctcactctgacaatgctggcagcttcttgcacaagtgatgaaactctcctatttccctcagatcaaagtcatccatacttctcagatcttccacgggcagcttttcattccgatcgcgaattggctgctaatgatcggaaccatcttgatcgcatcgatctataacaacgtgagtggcctcttcctttccctatttcattcttttccggcgacttatctcatgtcctccagacgacgtccttgggtaatgcgtacggcgtatgcgttatgtttgtgacatttttcgacacctgcatggtttctctggctgcaatgttcgtatggcggatcagcccgtacattgtcctcctcccgtggctcaccgtggcctgcctggacggtacatatctctcttctgcgctgaccaaggtgcctgacggtgcctggttcacgatcgcgctcgctgcaatcctcgccatgctgtttcttttgtggcgatacggcaaagaacagcaatggttcgccgaagccgaggaccgcgtccccactgcacatttcatcgtatccggttcagatggtcaaatgttcctgtccaaacgatacgacgaccttccagtcagcatcacccctggtcttgggatcttcttcgacaaagcgggcgagacgaccccgattgtgttcagccagtttgtgcttaagctcacctctttacctgaggtggttgtattcttccatctccgcccactcgagcaaccttcaatcgcccctgagaatcgatttaccgtgtcgcgtttggccattccaaattgttaccggctgattgttcgatacggatataatgacgagatcatcacacccgacttggcgagcgtaatagtccaccaggtccgggaatatctaacgtcgagcagtgccagcatgcccttagatggggaggatgagggaaaggattctgtgactcctggcaactccacgacggaaggcagtagagacgcccgcgctttcctcggttctgaaattaccattctggaagcggcatattcccacaaagtgctctatattgtaggaaaggagcagatgaaaatcaagcccaacacagcacgcatccgaagagccttgctacttgcgtttctgtggatccgggataacacgagaaacaagatggccaacctccggctgccaatagacaaactgattgaagtcggattcctcaaagagatataagtgtggcgataagcgatctggatgaaaaaaggcgcaggatgttgaagaatcagcttgaatcgccgctgcgacatagtacctccgtgtatctcactagcgaactgtttatattgctttttgtatgacagatagtgttactgttcgcggacggtataaagtacctcttcgttcagcggttgttccaatcttgttgtctccaatttcatcttattcaggctgcctaataggcgcagtcctctcatcaacccaagacaaactgattcagagatatcctgagatccatccaccgcacatatgtttacgttttgcctttcacaaagtcaatagtcaaaatttgaaaatggttagaggtggtgcatcgccaatgtttataccggcacaaggtcacgatttttgcatcgctaaccatggtcaaaggcgagaagcaaacccctagaatatatgttacgtatacctagggggtgacctcggtatgatggcaagaaccaacgttggaaggtggtagagtccacattgggagaccggaggtacatactttccaccattttattggcagcggcccaagtcacatcgccttgatcaatatctggttgtgcctttcttttttcctctctctttttcttctttccatctgtctatcttgacgattttcgactttctatttttcctcttccactcaaactatcttcaagtttacatttgaatcccaggaaaagatgattcgaacggcgacaacgctgagccaagccataaatgaactccgcgctgctaggggcaatatctcatctccgcagttttatcaactgatacacgagcaagatgcgagactcccttccgttcgtctatcattgttaaatgcctctgaagtcgaatacatactgtgcctcgagccggctaagactaatcagggattggattcctttcctacaatcgccccgcccgagttattaagtgagccacaggaatcgcagagggggatctcgctaacttcttgaagtcaaaaatctcgcaatgaccgacgatgctttgaagaacgaaaaaaacgctgaagctagtatgcgctggaggatgaatcacttccttctatttgcatttaacacagcaatggactcgtattctgaagagaaaagacttctggagatccactgtgagcctagatggtcattcggacccgtccgatataaggaccaggccgtgaagctatcaggatacccatcttacgccctatggtacggaaacgaagacgaagccgctttgaatgtcattgtggcccagaatacgaggtttaagcggcatgataagggaattccggaagttctaggatacatgggtgagtacaatgtaccactgatgaagtgctcattaactgatttggtcgaaggtttcgtccatcatcatcgcaagaatgcaaataaattgaattctccggtctatggggttgcaacggactctaaaacgtttcactttgtcaggctggacaataattccacggtatacttattcaatatgtctcacttgattgaagagttacattctaataccttctagtttatcaccgcaacactggactctgaggtagatctagaaaaggtgttcagtctattggttcatatcttgaaagaagcattgatcgtccaatcgactcaaccgaaagagccatctatgcaatctaatcaaggtgaaggatccgtcgatcccctcgtccccgtcgggtcttctcttagacgaaaggttgccaaggagacacaatatgaaaagctgaaagtggccgcagctgctttggatgaggagctcgattattatgacatagatgtgagggacctcgaactcgaatttcccgaagacgagacctctgaagatgagtattctgaagatgactaatgctttgaagttcggctccaaggttgcttccaaggctatcgttaccttttttgctatttgctaaactgggtgagcgtacaataacagtagtcacatcttgtctgatattcacaacaacaagcaattatttaaacatatcctgccttctaggaaaagtgtcttttgcgtagtgtagctatgagaaagtcaagtttattaatatggttgatcctacgccgattcatgatacttggtaaggatgatagacccatctcaagggttgagatccatattcatctcttcggaccccaccccactgtaggtttctgctgaggtctcctttgaatgggctggggagatggtagctgccttccggagcatccataccagcaacccgaacggctgctccagagctgcctgacgaccgacaacagcaaattccgaccactagtagatgttagaattccgagttcctgacgttgggttcttggctgatataaactagctcaccttcgaatcgtgactgatttttagaaaatgccaaactgatccagtatacgccatcccgtaaacaccacagttgcgcttctggtcattcttgcgtccccggtggatacaccctttgataccaattagctttcccaaaaaaagtatgacacatatagcgagatacatacccatatatcccaggagttgggggattggatccttggacttcgctccgcccttagcctcaacgatgaggacgttaaggcacaagccctcgctctcaccataccagacactatagtccattcttcctgagaaaacaacccgcttatgattaagagtcaccgggccgaaagaataggccctctcgcattgaacattcaatggctgggcatttgtgagattcgaagtggcagtcgtgtacgcattgagggtgacagcatcaataaaccaccgagttctagcttcagtgggtcgcgagcgaccaaatgcctgttcaataagagccaatgtggtgactataatgaattagctgtataccccttctactctatgtctgatatcacataccgaggtgggggggtagggcgagcggctgaacattcttcatctccaggtcataggcatcgtattcgagccgaagagacctttcaacctccttcaaggtcaggtctgagactgggacactgtcgtagcgtttcatctggccctcgaccttatcagttgcagtcttcagctgttgtttgtcgatcctctcgtcgaggaacttccggaccgacgatctgagctggcggaggagcttatgacgctcctttggtaaaatctctgtggcgatcattgcttcgccggtggacttctcggcaccaggcacgccctccatacgctcggcactaccgctcatcgttgcagagtggctggtagcgatgtctagtacggtgcaaaaaattggagtgatggaagtggaagatgcaggatgagaggagagttgatatgggaagaaagaagaaggaaagtactctagaaaaaaagtaaggtttcagccttgtgggcagcgggtgatggaccaagggtccacggatatcactaatctggtgcggaccggtatttcctttcctctttattttctttccagctctcgctgtgttctctctttgattcaattttcaagtcttcaagggagactcattcaagctaccaaaaggcaaaccaccttatcgcttcttattccctatgttctcaaccagaatggcagagtaagacccttctccattaccagctgcccgtaaacgaccactcgaggtggtggcgcatacgaattatagtttgttgagcgtagacgacgcaaattccgtctgaatctaacgtactatggcttacagccggcttctatactgtaatgaccctaatacggtccagatttgacttatggcctgcagccggctttcgtttcccgtggcggaccgtatacggtctgaatttaacttgcgaataccagaccgaggttatgttaatgaaagaccaaagaaagtggttctagaacaaagaataggtgcgaatgtggtagaatgctagtttctttgatggttgtaaggcggccgcgactgaaagaatgtggatgaccacagtagataggatttactttacttcctaaaccgaaagcgaagttaatgtttgcatggtttgcaacagggtcgccaggaagtgcatgaaacccagtcgcggccgtagaatgttttctcttttcctttttccttccttatacccagaatccttaattgactatacgaacgggcacgcaatacccactctatagaccccgaaaatcctttttataaacctaaaccgcctatcgcactcggtactataagtataggtaatatgtcaagtacccacactaatatataggagccagtttgattgctaacgggccgtgatctatagatggagatggaatggtggacacgacgggaatcagggccgtccacggatccccgatatttcggtcggagatgacgacagtcaggatacgccagacgcatgggcacatcatattatgagtttcccatggacgactcctgctggtgtaaacatcgtcaagggcgcgacagtctaggtcctccatcgaaagaatttccgggacaacacgcctggtagtcaccccatgtcgctttttgtgtacattggttatcgccggtctcgtatgtgtcatctcgacgaatagcgtatccctttacatattcctcggacattgttgagacacgattgacgcgagcttagaatcaacggtaaagggatgcggggtggaatcggcctggcaggagtgttgcgatggggaaacaacattatttattacggtcctggcaagactgctgaaagtgggtatgcttccgggtcgaaatcttaaaagactgggtcttcgcccgttatttgaggccagttacattccccgtttcgacggttcaatccagctctctatcaagctagacatctataagtgattgatctctctccctatgccatattttgtcccaaatttcgctccatcacttgatactggctgcctcattttttgaaatccatgcaagttcctgccgatttgagtattaatataccaggaagggaattcaggtgccaatagtcctaccaattgcacaagctcccgaacagcctgttccatataatccaaacttttgacagtagagatttccatagccgtaataagactaacgagcagtctttgatccttttcctcgaggtgataatccatttcaatctcgcatttcaatctaccaacatgtgatcgtaggcatttcctgatctccattcgtaccgatgtgttcttagcaacctcatcaattaattcagatgcctgaaccctttgtttcaattggttcgctcgctgatatattttaacctcagttggttatggctttagattgcttttgaaaggattcagcggctcaccatttcatagatttctgcaacagcaaccgggcagacatcatcccatttgctcttgagatgcttcagaaaaaggtcgaaaatgtcgaactctgagcgaggaatacaaccatttggaagtctgctacccggaaagctgctaaggaagacatcggcctttcctttcgagtctggactcctgacccatgcgataccgcatggctctgggcactgctcgtcgtttccggggatatgttaatatttggccgggaacgcaattgatacgtaagttatctcggtttcgagaaagtttttgccgatgtattgaacgtattgtgatttgccaagttcaaatttcatgtcacattcggcattgaactgtcttggtacacgagaccaaatttcgtgctgtgcacacacactgtatcaaagttagaatatagaacgaagaccccaattctttactcagtataatgttcgccgcccttcacgtgggagcaagtcatacttgggctttaggattggctgctaatcaaagtgatagtcaggaatgtattgattgatttgcacccagtaggtatcctcgtttccaagtttaagccagtcacttgaccgcatgtattcaagtgtagacattgagcttagtagcttcctcacaatgctctcgtttttttgatgtagagcgtattgtaaaggtgttcgtccagttcggtcttggcagtccagcaatggcccctctattttatcttccatcaatatattaaccagcctctcatgttgatggaagcacgtaaggtgcaaaggcctggttccttcgtaatcgcacctatccaaaatccagggatcaacctctttgccccaaagaacaagctttctaaacgtattcaacaatttttctagcccgtattccttttcataagtttctgaatggcgaattaagtagttcaacgagaggtctttgattttcttttgtgccatcaagcccacgacattctggtggttcttctctactgcccataacatcggagttcttgcgaaagtcccgtcggtttgatcggtccgatttggatcaacgtctttgtttgccaagagatattccacgatttgactgtcgccgaattgagcagcccaagagagccagatgcgtccaaatttatcccggcggtctggtaggagaagggagtctactaacttggcgaggtcgtggcgaggaaccattcgattttgtggtgtaagatcgattggcatactgataccatgatctaatctagctttaagaagccaccaaaagcctgtatgctggtcgccaccctctttatgtgggtcagctcgatagtcaagaagcaactgcatgatcaccacacgcgacttgcccgcggcaagtgagaaaggagttcgccctcgtgcgtattgatccacgttgacgatggaattctttgattccagtagctgtctcacggactcgacgtccgattgaataactgcgttgatgagaggggtgttgccttcacaatctgctagatcaagatcggcatctcgttcaataagaagaccgataatgtctttttttggcctcggaggggcctggactcactgccattgacaaaggcgttcgaccataggcgtctcggtggttgactttagctgcatttgccagaaggtactgaacgattttggtagacccaatagaaactgctcgttgtagcggagtaggatcaagaccatcatctggattgatcattgcattctcttgctctacaagaaatctcacggtctctaggtgaccaagttcgactgcacgtgatagtggagttcgaccctcactgtcccgccactccaccagggccccagctttctttaggagctttattgtttggggctgtcgtgattccaccgccaaaaagatagctgttctgcccttcgggtcggatagatttaggtctgttgtctttctttttaaaaatttgtcgatagtttccggtcgcatcgtggcttgccacaagggagattgtgatatctcgccgtcgcaaaagttcacgttaaaatcgtcacatttcaaaaatgcttctattcgttcgagtatttcgttctgccaatattgcagggccttcacattcttctctccttttcgctttcgcggttctctttggagtgtattcaaaaattctgccttcagagtgtcaaaagattccagaggaagggaatcactggtcggtttttcagtcatatttgtcgtagactgtggttctgatatcacaagcaagcaatagggacgaagtttggtcttggaatttagcgatatccttgaaaattctttttttttcaacctgcaaaaggtcacaaatttaataaattcccttaagctgagtagccaaaaataacatgcatggcccccatatgtgttaacaacttgcatgttatccaatgaaagagttatgttccgatggcacacttagtcgcccggagttcactaataactcattcggcaataagcagggtgaaatctaggtgagaattacccaagtcgcgcgaccaccgcgttggcccccttagctgtacatccacatatcggatattggatgaaggaaagacatattattggctacatgaaacaatatgaaagtggatctgtggcagatgactaattttgtttacttttgaccctttgggctttcctgtgcgtggatctataaagagccaacatcgcttaacatggggctcaaatcttggataatgtatcctccatcaccaccttaattagaactcccactcactgctgtctagagcccaattaatcttgtgaggggggtttgccaagccgtacagaacgtaatatgagtcagaccatgtctttgggggggagagaaactcagccgcgctgaaaccgcacatttggctagggaacaacagaaattagcacataccctatagtaccaccgtgggaatggaaaatcactcacattgacccagatacctgatcatagatcaggtttgttgtcgtagcgggggttcggctcgattccacatggcagaaactgtcttctcaataagtcagctccaatatcactgaaaggagagtgataacaaactcattgactcggcgaaactctcgacgaatgtcatcgcgagcgtcacgatctaggctccagaaatactcatccgaaagagactctccaggcaccttgtcccatacaatacagacagaaaatccccccgggaccgcatcgtcgttcccttgttgtgcctctttgtagcccaggagggcggaagtaacattacatgccatggacttgagcctttgaaatgcctttagtccagtgggtatatatatcggaatagcttggagtgctctggttttgggcttagtgtactccgtgccgatggttgggatctgacggtggattctcatgaacgcaagcttttgagtcaagtagtcctttcggtagcaaagaaactttgccatagtttaaacagggccatgacgctcaacttccttctggctcatcagaagggctgattcctcgagatgttgggtgatgatccatgtttgggcaggcaacgagacatatggatcggcatctgttgtgatctcactgccttctaggctagccagaaacggggttgtgacctggtgcatgacaggctgatatatctttgcgaaacagagcgaaagtttgttgaaatgtaggcgcggaattggagagaatttgagaaataaaaaagatgatcaatgagtgaccacaggactgaagtggaagccttaggcttcaggctttacttctgtttacatttttctcttcctctttcctcttctttttctggataacctttttgtttcaattgattgttccaacaaaaacctgtgagtcgcactgcgattgtaaattgatgcattattttggaggtagtatgtgtatactgacgtcatattgcctatactagaatataccacactgagcactccccactgtggagtatggagtatataagcttatgttttgaaagaattgggttaggcgttacctcgtgattgattgttaacaagcggccaagggacggcggcttcaaaagtggggttctctttattacccgtcgaccttgccagcaagggtgcgttttggtcacaactcacggccagagaggaagattaagacatttattgtgggtacaagtccctgcgaagacatcggagctcgagcagaaatgagtttgttttcaaaactcgcaaatcatgcgctggacttcacctccgtcgccaaaagccatctccttttcttcaatggcggagattcaggctccgtccggggtcatagcgcggggtagtgcccgtccggggtaaaactcgccgagcccatagcccgcggatgagatgacaccgagacgtgtcctactctgggattcgtcaggttctttaaagatcgatattatttatcttggatcctacacgtccaatcgccacccagaccatgttctacagacatagagagatcaagcatcatgagcatccaacttcgtgttcggaggccagccgtcgaagacactctgaatgggtcacgttgctgaacatttgcccgtgtccaggtggtactatatatgtggagccaagcatagcgctaactaataattagagcttacgagtaacctctcctagctcgtcggttaaattccaaggtttactcgctcattatgataggctcgacagaggatcaggagggtcggatttcagagtggacaacaaggaaaaccctgggacgggacacaggcatgactcgcactgactgaacgcgggaggattctggactctcccctaagatccaaaggaggatattctccggcgaatagaacgccacatctagacgcacaccaccacatttcagcataccccgcaaatgcaccagtaaatttcctccccgctattacctatcagggcgagtacatatcagatcacttcgcttgacaagaacccgccataatcaagtgacgctactaccgtagtgccgggggaaatgaccctcatgaatagagatgtcggcttgtggaggtcaaggtccggagaaagcttcacccaattaagctaagatcgggaccataatcacgagcatgtcgtcgcgggtataaagatctgagacccccagtcgtgcctgcctctcttccattcacccgtttccccagaaatcgtcaatatgaatagcgacatcacagagaaggagacctcagcgttagaggtcgaggcaacgaattttatatacaacgaagttcgtagtaaagagggaatttcgttattactatggcggattaattggtaggccggaattatttcgtttaaaccagatattcgttataaccaggttcgttataaacaggttttactgtactcagatggaaagatgtctgcgttgctatctaactatgcctcgggagtgcttttaatcacatggccgcttagtcatcctgatctagaaaccccgcagcaatatgtatctatcctctttcttgaatatttcacacatctagaactccataaattatctctcgcaatggttaaagttctcttgactggtatgtgattttgacttaccctcgagcccaagctaactatctactttaggaggcagtggcttcatcgccgcccacatcattgacattcttctacaacatgggtatgcgttagccaacatgaaaatacagagtattggttgacagttttactctagttttgatacagttgttactgtcagatcggaggagaagggtaaacgcattattgaggcccaccccgatgtgtcgaaggagaaactctcttatgtgattgtcaacgatgtagctaaggatggtgcatttgatgaggttagtagaacatcgtgcccctgatagatacacaactaacggaaaaacaacaggccgtcaagtcagaccctccctttgactatgtgctccataccgcatctcctttccattttaatgttcaggaccccgtgaaagacttccttgatccagccatcaagggaaccactggtattttgaaggcaatcaaggaatatgctcctaccgtgaagcgagtggtaatcacgtcatcattcgctgctattgtgaatggcaagcagcaccccaaggtctacagtgagaaagaatggaatccagtgacatgggaggaggcgttggaccactcgcaagtttaccgtgctagtaaggtaagtgatactggacggtcagcctgagtaaatgcaagtgctaagtcagttccataccagacctttgcggagaaagcagcctgggcctttgttgagaaggagaagccgaatttcgatattgctaccatcaatccgccactagtatttggcccgatagttcattatctcaactcccttgaggctatcaacacctcgaaccagcgcatcagaaacctcatccagggtcaaatgaaggagaaaatagccccaacgggcacttttctctgggtggacgtgcgtgatgtggccctcgcacatgtcagagccatcgaagtccccgaagcaggaggcgagagattctttgtcaccgctggcttcttctcgaacaaggaacttgcggatattgctcgcgagacccatcccgagttagagtctaagctgccccctgcagacgctcccagcgacttcccgaaaaacatctatcagattgacaacagtaaatcgcaaaagatccttggactcgagtaccgcccactaaagcagacagtctcagacaccatcgattctcttctagccgtcggtgcttaaactcatttcatagatccagattgaattgatggatacattatgagagaacaaatcaaacattcttcttttacaacaacgtatatgagagcaatttcaagcaataaattccatcaagtgccacgcgtcttacatcttataataataaacatgagagttacatcctatagatacaaaactgtgggttaactacagaacggcggtctcggtcgttgtcgcgcaccgtaccgctttggcccgtgttctccggtcaacttttctcgcgccagctatccaagatcacatagtcaatccactgaacaagatggcctccgccaggctatcgccaacggcgaacttgctacgaaactcgcgtttgttcgcactccctaaaactctcaagggccgtagtggccaaacgtcgagagaatccgacaccgcgactctgcattatcccattcgagcctccatcgttacaccgcaatcatcactagcccgaggcgattggggattgaaacgaccgttaccggctaagtcaacatcagagaaatcatcgaggcctgtcgttagagtacacgctctcgatacatatgaacatgtcaccgacttcgaatccgccgcagatcacaccgtcaccctcgagaagttccaggagctgcacatgcctatgtctctcccctccaaagtcaattacgctacaagtgttgtgccaagacatcaaagtccgttcgaagcgcatctcgataacaccgagaccagccagggtctccaggaacctggtgccaagcaattcagacacaccggcccttggcttgccggacagacggagtcagagttcgcagcgtacttgaagcaagtgactcgcaataagcctgagctcctgaagaagcttcgtgaacagtttgttgctaagcggtctgctgagatccggaaactggcacaggataatggagaagacttggaagctcaccccgcaactgtcaccgatgcggagttcaatgcctacattaaaactctgcgcaatgacccattcgctctcggtcccgtggtctatgagctgcttgatctcgcttccccccctgccgttcccagcgagcgtatcgggcgcaagtactatcaatctcctggaagcaagttgtcctcattcgaatacgccgtctcaggacccccgaagacacacccgtctggtggtctgtcatacacacgatcacacgcgctgattcacaaccatgcccagtttggcccacaagcccaccagcgccccgtggaggctcgtatcttgcgccctaagggccgctttaagggacgcatggcgcgtgccctcgcgggtattggtggtattgctgtcgaagatttgaatgccatgacctttgtggagcaaggcacaccccccggtctgactttcttcgatgcgtccatccctggaggaggtaaatactgggttactcctatccgggcttcggttgactccgacggccgcattggcctttcatcttatcgcgcgagtgcaaccgccaaggctccttacggcatcgaagactaccacaagccgactactttgactatctccgatgttgccactgccccatccccgttggtcccgagattggacagactgccactcggtcagcctcggttccagccttccgcggagaaccgaccccggaggcaacccacgagggggacagaggatgtcgcacgcagccttcttaacaaccttaactctaagtcataggggaaagtgaagttttatgaggatgtgcaagggattgtaccatgtatgatagatttggtgcttgtgtaaagctattttcgttttcttttctgattatgtcatatataaggtgcatcaatatcaagttatttcgacagcggtaaaacaaccagacaatagattcaataattgtacgtatacttgaggatgtacttttgatttgtttcctacctttggatatcgcgaaggattacataatcagataagatacgtaagccacgtgactgcttgattagggccggcctagggcaatgacccacacaggactaagcgaaacccgatttctcaaacccatccaaatcagcacgactactctggatctttcgaacattcattccgccagccaacaaccgccaaaatgggtcgcgtccgtaccaagacagtcaagcgctccgctaaggtcatcatcgagcgttactaccccaagttgaccctcgacttcgagaccaacaagcgtatctgtgatgagatcgccatcattgcctccaagcgtcttcgcaacaaggtgagattatatacattggcaccaacaactcgagatctccaattctgatccgaaatctcttctagatcgctggttacactacccacttgatgaagcgcatccagcgtggtcccgtccgcggtatctccttcaagcttcaggaggaggagcgtgagcgcaaggatcagtacgttcctgaggtctctgctctcgacgtctcccagaccgagtccggccagcttgacgttgacgccgacaccaaggaccttctcaagtccatgggcgtaagtttccactgcacactacgatgcgttggcatatttctaatttacctctacagttcgacaacctcaaggtcaacgttgttgccgtcagccagcagcagcaggtcgagcgcccccgtcgtttcggtccccgctaaatccagcgcccggaataacgaaaaaaacaaaagttcatacctggccttcggtcgacccttggcggtacccaaatgtctgttctggctggcttttcgctcggctagcatggtttagcttagtgtggagggctattcctggatgaggaatgaataaacatgattctctttgagaaaggtgtcgctgattctccgaaaggagatgacgcttgattgccaattttccttcctcgtgtctacctacccatgagtttactctctggtttggacctacgtaggagttcttggactgggggttacctcagtccgagagactcgagacttttggtggtttgagtcatgcctggatttatacgtacatattctatatatgtacgagtcctgctggccagcctatagccatacatatggtctctgtagattgttcattactcatgcgtcaatgtcaacattgatcgggtattaataagtagaacgccgaaaatccccttcgaaatcccatagcagcattgctatcctcagatccgatcgagcaaatctatgtctccatcttgatcgacgtctcgtcgctccctgggcacgtatccttcaatggaaccgccccttgcatcctccggtcgcatctgtggagcggcagccacctgctgagaaccacgttgattctctctaatatcaacgttaacacgtccatccggacgaatcaagctggtatcgccgcgttccaacgcaagctcccgggaccgattgcgattcccaagtcccatgctctgtaaatcatccacaacggatgagatactgctagtagcggcgggtgccttcaagcgcttggcgcgagcttcctcgagtaatagaatagacgtgccccgcgtatcgcccgcccgtcgttcccacacaggcttctcagatagctgcacccggatccaaagagctcgctctgcgcatgcatccgagcaccacttttcgatgcggtcctgtgaaacaatctccacgctgcgtccacgccctcctggcccacttcctttaggaccgtatttaaactggaacccgcctcgcgggccgttgtcttgcttgcgatgcttgtggggacatagagcatacccgcacaagtcttcgaagtttcgctccaggatcagattgtcgtagtcgctggggcgaaatggggctagcgaatatttgagttttacagcatcttcttgcgacggcgcggctgggtccgctgtcggagaagaggggagctcgaggagctcaaggatgcggttaaggatgacatcttcggcatccttttgggtctgaatctgctgcgcgtgttccagtgcgacttcgaggtgctgctgggtcgcaccgggcctaccttctaggtatttgtcttgctcttcttgtgtagggtataggtatgaaggtgggggtcgctgggcattgatcgcggcatatgtctcgggaagagaggtcttgagagcgtgacttggcccttggtgtgccatggttcttaactgaggcccctggaggataagccaagggtagtttaaattgaagatgggttgagttgggaagtgagaggaaatagaaaaaataaaatcagcagaattcgactccaaagcggaagaggcaaaaccccggattgacccccaatgggaggagggacactttgactgctgacgtaggctttgggcatccaggatatgtatggatgtgtggaggttttatgcttgctatttgacatcgcataacttgtagatattgacatatggtatcctacaatatgcattatatacatactcggtacagtctacatatggaatatttctctcgacctaggtagttatatagcttcgacgtcaatagcctagctacataccaaactatttaacgtacatcacctaaaaacaagctgaatacccacatatatctagaatcggtataaattcccttggtatttcaacacatctaggcattttcccccatgtgcgtgttccttggttgatgtgttaagccgccgatcgtccagtggagcccatttccctcatcccgccaagtgacgaccacctcgctgctccgtacatcctcctcccctactactttttttttgtctttccgaccgtgttccttttttctcatcttgcatcaattctctactggccccggctacggtgttcggttctccacgccgtgagtgtttccgcagtcccccctccccccctcatctcccccgtaggcatccactcactgacgtccgtttcatctaagctgacacgccttcgtaccacaaaggaattgattcgtttcgccttaaatattgctgcatgctaaaggcattgaagccggcgattcgctctgtacagatattctagcatcattgcgtcacagactcgttcagcattcctcactccacaccgattgtcctaaggcctgaacatcggtctcggcttgccagatgtcagttccgcccttcacggtccgctcggtcttcgagtacgcgtcgggccacgatgatgacctcaacttcccgatcggtcaaatcgtgaccgtcaccgccctggaggacgacgattggtactacggtgaatactcagacgcccagggggccagacaggagggcatcttcccgaaaaacttcgttgaaaaatatgagcctccggcccctccgaggccatctcgacccaggcccaaaaaggagcccgagacgttgccagtggagtctcccgtggtcgaaagcaagcaggctgagcgcgagcccgagcccgcggtgcagcctacagaggaagattatgggattcaatcttcgcagccactgccccagtcccctcgtctacatgcgagtgcccctgtatcagaagttgtatcctcgcccccgcagccagcaaaggcgcccgctcccgcccatcccgtggccccaaccgaatccgcagccaaagcaccctcaaaacctgcgcctccggctgtagcggataagccctcggggtcatcattcagggatcgtattgctgccttcaataaacctgccgctgcaccggttacgccattcaaacccggtggttcccagccatccttcgtcaagaagcctttcgtcgcaccacctcctagccgggatgcctataagcctccaccaagggaacctgcgcccaagatctataaacgagaggaggatccagatgtgaaggaacaaattgcccgcgagcctccggtttctgaaagccggcctgcccatattgaaggtggcgaagagggagcagaggaccagcctaagccaactagtctgaaagaccgaattgctttgcttcagaagcagcaattagagcaagctcaacgtcatgcagaggcagctcagaagaaagaaaaaccctctcgccctcccaagaagtcgatggacgaacccgtggctcccgcagtcctcgacgaggtacaggaacctccctccgttgaagaaccaccggctactcgcgatactagtgttgatacattgagggctgcggcccctccttcacagccccctgccccattctcacccacccaggaagtcgcgagtgacgccaatgatgccgactactccgctgctgcagactccgaggatgccggcgaaacatccaccagcaaggacgatgaggaagatcaggctcaaccgcgtccagtttctcgtcgtcaaccgttgactcatgcagtcgaacaaactgccgaggcagatgttgaagacgagggcgatgcagaggaagaggaagaggaggaaatggaccctgaaactaaacgcagaatggagttgcgtgagcgaatggccaagatgagcggaggaatgggcatgatgggtctcttcggcccgcctatcggaggtatgccaggtatgccaggtatggctagtgccggtagtgctcgcaagcccaagactcccgtcgagtcagagaagcggcttggagagctcgaatctgagcccacttcccctgccaatgcgccccctgtccctatgatcccacttcctgggatgaacgcggctagcaagccggtaccttcttatactgaggtggagaaggaagaggaggagcctttggcaactcctctcactgaacaacaccccgcacgcgatgtgccagacgtcgaggaggtcgtccacgaaggtgcactgcctcgtacctctattgaccgtccggccccggctccaccatctcaaggtaaattattctccagcagtctgatgcatggttccaattcctgatagtcgcagatcgttccgcgcctcctccgcctcaccgagagtcaaggcccgtcccgacagttccagtcgagccaccggcttcacctccgccagttcctgctggtaagtacccagatccggaagcaaattatacgacctgggcattaacgatgatatacaggtcgaccagctcctcctctaccacggcccacaactgccgacaagggcgaagagtctgatgatgaattgtcggtgcacacatctactctgtcgttgaataattcgcctgctccaccacccgtgcctacacatgcggttcatgaacatattgactctcgccgatcttcaatatacgaccctatgccctctacggcttcgacccccgcggctgaaaagagagctagtcgtctaccaccccctattccagtcaatccgccaatgccaccatcggcgcagggccgcgctccccctcccctgccttctgaccagcttcgtcgccgatctaccgtcgacagtcgcacgagtgcgttatctgctcctcgacaggctggagaagaagcggaaggagaggtgactgaatatgatggagactatgacacagatatcgcatcgggtgtgaaacacaaggatgctctgaaagcccacgagcgtgaatccagctttgacgagggtattttcaccgacgactattccatccagtctccgcgcagcccccaggaatcccggcatcatcacctacctcctcctccacccacggctcccagagcagttccgcctccaccgccaagccagccgccccggaatgcacgtgcgtctatcgacacacctaggggaccgccgccccctccgccggacagagagccaaacagcgatgatgatgttgaatatgaccctttcaactacgctgctccccgacatggtcttccggcgtctccacccgtcccagtcggtcgcccagggccgcctcctcctttcccaacacaagcggccgatgaatttgacgatctatatgatgcccctcctgtgcaaagcccagtaagagaaaggagtgataagcgcctttcactggcgcttccccaaggccaggcttcgggtttgccatccccgtccgcagctcgaacccagcgcgcatctgtggatattctaagaagtcagcccaatcttcgccgatctatggatgtttctcgcccatctattgaccaaggctacatcgccaccgatgttgatttcgccgcgtataccctctggtggactaaacccaagacaccgcctccagctttccagaaccgcactgatctgcttttcgaggtcgaggagactgcatctacgaaccgcagtggcaaaacgacagtctctaaggacgtctatattctattcatcgattactctcagacagtgttgaatgtccagttcgatcccaagaaccccaaggatgcttccttcgagcagcgccatgaacccccaccgctcccgtctcgccaggatcagctcgagcaggctcacattcagcttggaacccgaatctcggaagccgtcaactcggtccaaaactctaccgttggagacggcactccgttcggattggtccagcacctgctcagtcctctttccgacgcgctacttccggtggggacccgcgcttacggtgcctcggtttattcaaacctggccaatgcctccgtgtctcagaacgatgaaatccgcgctggtgacattgtcagcttccgcaatgcccgattccagggtcaccgcggtactatgcaccagaagtacagcgccgaggttggaagacccgaccacgtcggcatcgtggtcgattgggatggcacgaagaagaagatccgagcctgggagcaaggccgcgagagcaagaaggtcaaaatggagagctttaagctcaacgacctccgtagtggtgaatgcaaggtctggcgagtgatgccccgtagctgggtgggctgggaagccagtaagtaacaggatggtcttttttgttgctgtgattgcgctatgagcagacgaccctttcttttgtgtttttgcttgccccttctagattgggtgagatcatgtatgaatgaaaaggtacctcctttctcccctgtcttctatattcttctccctcttctcttgtcttttcctgtcctgctcccctctcgcgaatcatgtggacttggtgtggtaatgtgagatgggaaacggtggtccctatgtgatggagagttgagcgagcgtgcagcttttcgtttttttttttgttaatggtacatcttgcatgattctatcccccgcaaactatgagatactattctcgaatttctgatgtataagtggtcatgtcttgattcgtagataagttgccatgtagggaaattgtacatgctgcttaggccaacgatgacgacaatatatctccttaggggtcgtctccggtaccgagcacggaatagtcaagtttgtactttgcacgagtgaggataatgctcacctgcgttctagacctcgacgcccccgtctgaaataaattaagactaggattctagcgagctaacaaagttttctctaattaacggatcgaaattcgatgacggacaccaaacccaattgccgactccacctgagaccaattcatactccgtatgaccgtcagccgagttaaaacagtgcgtcaaacttggcctaacccacaaccaggcacaaacctacaatattgaatcgatcttgagcaccgtacggagcacagtggcgaggaatcaccaggtgagcaatgagcggatcagccgtggtcatacgactatggcagattctaactattgcttcatgaagaccgtcgagagagaccgggggctgccccggtcccggcaacccctcttcactaacagtggatgggggaggagggcctccaattataatgctcgtttcgttttttttttgttgagtttccaccggtttggtgttggcatgttcggtggagagtccctcgttggtggaagcccctggatctccggctagtactccggatattgatattcgcgatcggggtttctcgattccgagttgatcgtgggtttctaatattggattatcgggatctcgttggtttcgatgcattctggaagtatagcacgtagatagatgcaaggtgacaatatccagtggtactcgggagtgtagtgtatggctgataaccaggacttttgcccgggaattttgttttctctaaaaatgaaaccgaaaaattcggccacgagggattggccccgcggattgctccgttagttaagacccggttggcggatgctttccggtacgttatcgatgtctttcgatgctccggatactccgtacggagtgctccctagtattattggattgacggtgatgacatcaatgcaatcaaagctacggagtagatatcatatttatgatacatacataacttggaagtggttaacagcgctcgaaatgtacaagaaaaaacaagatcccgagttaaattagtatccagattcggactagtcaggggcactacaccaacttccctagggctaatgattcgaatcacgcctatcggaaggtggaaaagcttgtaggcggggctttcccaaacggctgtcaagcctaccggccaagacgcacctggggacgcgctaaagaagtttgctcctttttattttattctaggctttggggatgttcttcggttccacacagatcggatgaattcctaatatcaacagacccctatcataaatagttgctgggtcgagtggagatggacttggactctatcgtggcatctaccatggttcagctcttgctgctaacattgctgttgatccacaaccattactagttagttacatgtagtggtggtgatggtgtagaggatgtcggaaatccaacatacatagcctcatcagatgcagcgaatgccttgtcatgcacgctggtcctgcagagtcggaacattcatgagttcgttaggttttggcctatcttgtgtcattgttgtaccactggtaccttatattgtggctgaccattgtttttcaaagcaagtcatattttcaatatattgctctatgggcatagtgcagattaagatcgcgacgaactcccatgtatcttccaactttattgcatgttgtacggggtacgggagtatggcatgtctgattagtgggattactagagagttacaaccaatgaatttcccttgctgccggcttcctaagtaaggagtttcacattatacagtatgtatactgtgactcgatcctatttctcgattctgatatgagagattggacggatgaactactccggaccgtgaccaccttccacattcaaaatcctgctcccaaactgtgaaatgaagtaatggggcgacgatcttggtgtttcccgtgtccaggcccccgggaccccctagcgaatgggtgtttttcattgcttcattacggagtcccccgatgtcataagaacattggaaataacatcgcacacacaccaccgaattgcatgtttcgaaccagaattggccacatcgacatgtccaatctcgcagtcatcagggtggcgctcagccccaggttccacattccggaagcgagaccagaaggaagaggacagagggaaaaggaaagaagagggggatgtgatcctgaacattttatttttttatcttacgcaaggggggtgaaatggatgacggtaagtttgggcagtggctacctgatgttgagcggagtctacactggtcgcctaagtatccataccataccgtacctgcatcggaccatggatgcaggctcgggaagccccttggggcatggacagtgcaggcaatgcaggtctgctgaaacagtaaataaacagagaatatagatcgtatataacattctatatcgctaccgagagatccaaggaatataaccattagaataaagaacacgaacggtacttaattttgatccgctggtggacaccccatttgagacgatcatctagatcttatttttttttctcttggtaatatcgtatgccgctaagggccctggacagttacagttctggatccattccaaatctccccctcccatcgcattcttcgcgtcaatttccccagtcattctttcttttcgacctatttccttctcgacggactctgcagcatattgcgtcccgtttctctcatgctgtgatctgtcaatccccgctaattactctgattggtctggcacccggaccattcacggtacacggcgtgaactcggtattcctggcgcttcttctcttcaggggacgtctctctctccctgacctccatctgcacttgttgttgcacttgaaggtcatgccgctcatttcattctctggataaggacatccattgagtcactttgaccgcattgagccaacccgggacactgatcgtcgctgaagctactactacactctcggatttatcgacattcactcaacccaatcgtaaaattatcgaagcgcattcattcctttccaattacgaggtggcccctgagcacctcgagcatcccgatgatgaaccgattccgcaaacacaagaaggcgaaggaggccgcggaggaagaagcgacatcgccaggattcagcctaaaatcatcgaagaagaaggtggtcgaaccggaacccaaactagatttcgacctatcagccgcactcccgccgacagacaacttccgcaccagtctgctaatgcccaagttgtccgctcgatttagcatgctcaaggaacaggacgacccactctcaatgctaggcaaggctagtgatgatagcgttctatttcccaagcgcgcttcccgactcaatttgttcggtcacaaccccgccatgctgacagacattgacgaagtttgctccaatgacggtagccgaccatcctttgcacttgaccgcacttctttcgcttccggtggggacggctatggtacggacgacgatcgatcccaaacgggcagtatgatgagcagagcccgtcccgccgagggcaataatctgtttggaggtcgccaaaagatttataagattccggtcagatcgccagcggcaacaacccccgatacgcccgacgctggtcgctggggaatgggaaagccggtctatgagcatgacttgaacctatctgcgtttcagcgattgcgtctcaaggagaaggaagagagagcggaggccgcggctgcccgggaatctggatatgccgcctcaactgcttcatctaacagccgactcacatactcctccaccgcatctggaccactgtcaacagtcccaacatcaactgtaggaacctccgccgacgagtcaccgttgaccacgtcccaagccccagcgacgggctatccgttccccgaaaccctccctgaggactctcgacccggtcctggccccatgtctggcccgcgcaatggctcggttcggagccgtcgtctctacggacaaggattgacacaggctgctcagagccagcagagctcgactttgaaccgcctagagagtctgagtcgccagcgtgctggcactccagatattccctctttgaaccgtaacttctccaaaagtgccaccaacctaagggaccacctgaagcttgcgattgtcgagccggcttctaccacaggcccgactagccctcctccatctgcaacatcatcaaagccacgaatgtccggagaagccgggttcaaagaccatctctcgcctagcacagcaacgtttggggctcctcccctgagccctcccacaagcgagaacaacgacgttccctcactgttggctgcctcaattaacccagatgatcatggaaaggctaccgctatgggcttgttccaccggcctgccactggttttgacgagcaggcattctcccgccgccaacttcaaatgcaccaaggccgagagaccccgccccctcgccgcgcatcgcctccgcgccgacctctaccggctgaacccgtgggccgtgctcggggactgtcgaagtctagctatcgttccacagcagagtcggcctcatctcactatagcatcgatccttcctccagcgttgaggcttctcccttcagacctggagtgaggactttctatgctaactcaagtgccagcgagtctggtgatgacggagagagaccttcctcgcgtgaactgtcatctctggctagcgagtacggtccgccgcttcagcagtccagtgtgggatctaacaagccatcaacttccacaaaggatcatctcgaaacgcttcccgaagtgagatactccgacctaggtgatcttagacctattgacgaggacggccttgacttcacaatttcttcccccgtagtcagcgataacacacccaaacgacctgactcaccaaccctggaaccagatcaaggctttggtggaatggggggactggttcgatctcacctacgccaggaaagtgagatgtcttctatcttccctcctccttcacctcgctcgtcagagcaccaaaatgacaaactttttcctaagaccgggaccccccagccaccgaacggtcttcctacgataacacaaacccgtgatgaaagtcggtcatcatcaagaacccgcccaggaacatcgagctcgcgatctccttctggacattctgtcgaaggtgcaggttctcgaaacagcgcagggtcatccgcacctggaactattgccgacacacctttatcgaacggcccgtcctggagggaggaattagaacttcatcatcgccgtcatggcagcaccgagacccaaagggaacgagaggaattcgccatcgagctggcagagagacgtagaaaggtgcaggagaagctgcgtagtgtcgctgagaacgaaagccgatccagcagccccaacccgggccgctcaaccccagaattctcccgggctggtaacgcatttgccatgttgaagcaaaagtctagtaaacaagctagcacaaagccggatcagaagaagttgtttggttatgttggtggcaactcgtctacgcctgctctctcagatggctcgtggcgcgaagaggagcgaccctctttcagcttcggccagcaccccaactccagctctccccacattggatcagagcgttcgatccgttctcgtatgccatctatcagccgcgacaacagctacgaagaatcacgcgagtcaagccgcagccgtggggagccnnnnnnnnnnnnnnnnnnnnnnnnnnnnnnnnnnnnnnnnnnnnnnnnnnnnnnnnnnnnnnnnnnnnnnnnnnnnnnnnnnnnnnnnnnnnnnnnnnnnnnnnnnnnnnnnnnnnnnnnnnnnnnnnnnnnnnnnnnnnnnnnnnnnnnnnnnnnnnnnnnnnnnnnnnnnnnnnnnnnnnnnnnnnnnnnnnnnnnnnnnnnnnnnnnnnnnncaagccgcagccgtggcgactcgcctttccgagaccgtgcaggctcggatgcatcaggccggtctaagagtcgaacaagacttcgggatgatcttcaaactgtgaacgagggtccaatcgagaaaggctctgagcctcctctgcccgtctcgcgtccgacatcgagtcgcccatcagcagaaatatccgaccctatgagtttcgaacgcacttcctctgttgcttcgggcagacaccgcagtagcagccgatccggcacaccaagctaccaatatgaacggcccttccagttctcgtccaacacgtcctcaatcatcggcgcctcgcctcgggccccacccgccgcgccgggctactctgccaatgcgactcctccgctgaacgaaatgccaacagacggctcgtctacatccctggcttcttcgtccagcggctcgcagaattcccaacgcgctttgggatctgcgtccctcaccaagcgccccgtgaacaaaaggctgatttccgagcctacctttctctcatccacagcaagtgtccctctcgtcggtctcccacccggatccgcgctgccttcacccgtcagcgcacccccagtgccacctatgaacccccgccgtcgccgtggaaccgccacccaaaccatcttgggtgcgttcaagatcgacaagaccgattcttcacgtgtctcgtccccggccccgagcgccgaggacgaacacagtgtcttcccagatgatgagaaacgcccgcgctctcgaaaccgtctccgcaagacttccagcgagggcggtaacctgaatgcgcgcgcgcgccaggaatccatggcggacatcccgccggctgttcctcaatatccgcctcccgctatccccgccgagggaggcatgttctaaacacaacgtcccttcccatcccatcctgtacacattcaccctcccttgacctaggctctctttattcctttgtcctctgtcttctcatttacctacatctactctacctatcactccctccaaaccccccttttccgggccttttcttctcttatctggactgtcttgtcatttctgctgttgacgactagataccactcggtgcatttgagcgtctcatgtctactttcgatcttttccttctttcctttgtgttatacacacctttgagctggattttcatcttccacgtatgtactttattttcgaattcatggatacactactcgatacactggatattatggtctcgtaagctctgttactcgtagcttcaggttgaacaaggctatattgcatactctctaacacgcctcattcaagccccggccactacacagtaaattggataatgtggacgtattcccgtagattcgattataggacgatcaagcattgatcttattgcgcgcgcttggaaagcatcttaaatggtatataattgcttttaatatagtatcatacattttcattgaaattagttcaagatctatccaccgccgtcttgaggtatcccaagaccctctcaacaagccacttccgcgcctcagcttggtcatcattactcaaagcatgagaagcattagggataacgccagtgtgcgtttgatcccaaatctgatatttgccatcatggtccgtagccttctgccacctcgccagcatcttgttcttatccacataatcaggaaccgactgatccttcccagagatcaataccatcagcttatgattcaacagtgcctgctcttgaatccgaccaaaggtagtcaaaaagtggtcatcgctgagatccgagctgaacagatcatcctcctgcggcgactgcggactctcaggactaaccagactcaagaatctgcgacagctaatcggcgtattggcaggataaatcatagaagtcaactccagaggaaggatagtatcatggggcttgccctcggcaacagccgccttggccagcgcctccatctcatcatataccgcacgtgccttctcaggcgtcgtatctccaatgccccacttcaacacgcagaagatagcctcgcggtccgaaacgggcgcttgcatgatcgcgccgtccagcacgggccgcttgatgtgttcgatctccgggtcgaaggccgggatcttggtgtgcgggtttggcttggagaggtagtgcagcacgcactggctgcccgtggaatggcccatcagggcgatcttgccgccgccgaatttgtcgcctttgtagcttttgatgtattccagacactgggcgatctcgtccgtgtcgcggtcgagatggccgaggccccaggattggtaggaggatgtgaggttgagggtgaagagggaccattcggtttgctgtagggagtgggcgagatcggccatgtaggatgttgttgcgaggccatcgccgagtccgccgacgaagaggagactgtgcggttggcggacggtgctggaggtggattcgaatgtgacgagggtttcggtctacatggtttcaattgttagttgtagtcccaattgttattgttgacagcggtgcgggaacatacgtagtggtgcaggataccgggaaggcctcctttgggccagaacttggacatgttggcgtgtgtgtgtgtaaatgtgtgtagtgggggtagtgtcagttgaagggaaaactattctaaaagctagagagggcgacctccgggacaggatcttttctttaatgagccaattgccgagatcgggctctatgtctctccggcatgacggaatgtggacaattttgtgtcggttagcttggaccgaataacgcgatccacaaggtgaacggtttcaggccatcttatcaatctgattataccgaggcaagccgagatattaggtaacaaatctcacatccatggaatgttcagtgccaaggtccaacgttggaagttaggggaaatgcgggaaactgcagactttttgaggaaattatatcgatgtcttgaatcaggtacatgtatttcaaggtacccgttcaggtaatactctgtattggaaaacaacgggctgttacgtattggatacggcgggatgtatttcgtcatcacggtaaatacagcaattcaagctcgattacgcctgttacggctagtaattatacaaagctttgcacgggaagtgagatggccaatgaaactccaccgttgaaacgacacatgcagactagtcggcactagcctgtataggcaggatcgacggatctgattagattgattggctgaaaacaggagaatctgattagattgcccctctttgaaaactctacccaacgtgcaggttcggccgaacgttcgtcagcatctgatcagcatgtgcatctcaacacaagacttttctgaaatgcttaggaagtcttggtcagccttgccaggctcattcgaagatctttgcctgaagaggttgtcgtcgtgtataatattattcattcggattcgaatgtagacattgtgcaaaaataagattaaagtatatgcgtagcttttatcagaccacgaaattaatatagacaagtggatggctactttgtggcgtttgcaagaaatccatttaaacttgtctacaagcgagccaagaaatcaacgtaaggaacgtgcgcgacagagtgaggcctttatcaaattttctttttaatattccacgcttattgcgcgaggtccaagcggatattgacttattattatgtactattgttcaatgtattcggatgattctatgctagtacattgcgagaagtgtacacgactggtacacgacacacatgtgcgtgtgatttttcaaggtgggtctcggaatgcaagaatatcgaaaatccccttcctcgttcttcgcttccatcgggcttttccgcttgacacgcacaatcgtggatcccctaagcaattggcctccgagacctcggagaaccattctttttcagtttggagtgccttgatgtgtttcagaataggacgatcatattcaggctgactgcaacatctgttattttaatttatgtcttgatggtgagcaatatcctaactggggtcttccgtaaccaatcttggcgtagcatttccttttttccctcgtttttcccttctttcctcttgtgtggagtctgtggacccgatacgtcctgtatcatacagtattgtatgcagctttgagatctgaaatcacatacgacatacacgtatgggtccaaaatgctcaggaaagatgaaacggccacatgcttcggctttcatactgccttccagaacgggcgtgaataatccactcaccccgcaatagccgatctcggtgatgatatgcaaaatacatgcagggcacattcaggatatcttcggagctttcaagccttgaggtggagctgatgcagaaccgtgtctagttggctatatagtgacacacttccgtcaaattaatccgcgcaaaggctcccgatctaacaatcaagctcccaatcccttcacataaactcgagggtaccaagaccagctgcgctggtcagccgtcaaaatgggcttcatacctctcgaagatgccaatattcgcaatgcgccaaatggaattgagaaagtgccaacagacgtcaatggcgactttagctcattccacattgcggatcttgcctctgaacaaatcatcactccgaccggcatgaaggaagagatcgtgctgttgtcctggctcattgtgttgttgcgcagccgggaagacagccaaatatcatacgactggtcctacaaatattccgcaaatggcgctgagcccgagtcagtgaacaaaatattgatgaatgaagtaatgaaaggattacaaagtaatgtgggagaagttgcgactgcgatctctcggaatatcaccgcgggagcgtccagtgacgcatcgctcgttttgagtaccagctctctttcgcgaacatcggaagaagccaaagatgaagtaagtgaacgattaaaaccatagccactgaattataactaaccgtaattgaaaagggtatgcttcatctcgaagttcggttcgataatgcccacctcgagatccgcccattgtggcacaccgagaacatgttgccgtacacagtgaagcaccatgtcgaggcacttgccgacactgtcagagtatgcctcggaaatcccgatgcgacaattgaacaatgtcttcgcccgactgaaagtgatctgaacgatatatgggggtggaaccacgaattgcctcccacctacagattttgtatgcaagatatggtcgctgaaagagctcgcgaatacccagacaaagtcgccattgattcctgggatggcagcttgacctatagccaaattgatcagtggtccacttccgtagcgtgctcgctcaaagaaatgggcgttgagctgcacgatgtcctccccgtgtgctttgagaaatccaggtggacgatcgtcgctgtgcttggagtgatgaaagcaggcgcaactcttgcgctcatggatccaacacttccgcttgcccgtcttcaaaacatggctgtacaggtcggcgcaaagtccatggtttcatcccgcatgcagtatgagctgtcgctggagatcatgcccactggaaaccacttcgtcgttgaagaagacgctttcacaaatccagcaaagtccccatcaatttccgacttacccgatgtaccatcctccgccctcatgtacatcatcttcacctctggcagcacgggcactccgaagggagtgaagatttcccaccaaacttacacgagcagtgcaatccctcgagcaaaggcagttggatacacgccagagtccagggtgcttgatttcgcatcctatgctttcgatgtcagcatcgacagtatgcttttaacactcggaaacggtggttgtctttgcattccatccgacgaggatcgactgaatgatatcaacgaagttatccgcaaaatgcgaattaactacgcaggcctgaccccctcagtgggccgaattttggacgcggatgtcatcgcatcgctcagcggcctcggtctcggaggtgaagctgtctcggcaagagacgccaaccactggggcaaagaaaccagaatcattattggttacggtccctgcgaatgcaccattggatgcacagtcaatgccagcgctgctaccggccgagattatctctccattggcccaggcaacggcgcagccatgtggattgccaacccgaatgaccacaacgagcttgtgccagtcggcgctgtgggcgagctgctcgttgagggaccgattgtcgggcagggctatctcaatgaccccgagaagactgctgcttctttcattaatgatccaccttggttggttgcaggccacaaaaactaccctggtcgtcggggccgtctgtacaagactggagatcttggaagatatgatcccgatggtcttggtggtatcgttttcgttggacgaaaggacactcaagtcaaactgcgcggacaacgtgtcgaattgggagaaatcgagagtcagctaaaggctgttctgccttcagaagctaatgtcattgctgaagtgattacccccaaggattatggaggtcagccaatgctcgtcgcgttcgttgccttccaaccaaagggacatggacaggccgagcttgccttggatgacatctcaagcgaattaagtagcgtattgacaaaggccaatgcggacgtggcgaagactttgccacgttacatggtgccaaccacatatatcccggttaatcttatgccggtgttgatttcaggcaaaactgatcgcaagcaactccgagcatttggtgcgacagttgatctgcgccagctagaccaaggagctgcaagcaccgcttcccgggaactgaatgagcttgagaagcgcctgcgacaggcctgggccgaaacactcaaactcgatgcagaagccattcgccccgatgataacttcttcgccctgggtggtgactccttggcagcgatgagactcgtgtctgtctgcagagcgcaagatctcgacctttctgtcatcagcactttcggaaaccctaccctctcggcgatggccactgtcgttcagccttgcagctctcatgtacaggaagatatcccggcattctctttaatctcccaatctgttgagagtgctcgcctcgaagcagcacaagcttgtggggtggatcaagaagacgtggaagatatctacctttgcacacccacacaggagtcactgttcaccttctcgctcaaatcgacaaaggcgtacgttgctcaaagagtcgcatgtattccgtcggatatcaccctggatgcttggaagaaggcctgggaagatgttgttgcagcaagccctatcctgcgatctcgtctggcaccgcttcaagacccaggtctccagcaaattgttgtgaaggaaggcatctcctggagatactccacagatctgaaccaatatctcgagaacgaccgaagcgagaagatgaaccttggacaaagtctggctcgatacggccttgtcagcaacgagaatgatgacaagcggtatatgatctggactgtccaccacgttctctacgacggatggtcagagccaatcgttctcaagcaggtcagcgatgccttgcagaaccgttctgtcgcgatcccgacacagatgcgggattttgtcaagtacgtacgcgatacagacgagactgccatgcatgacttctggcgacgggagttgaagggtgctgtcgggcctcagttcccccgcctgccctctcgtgactacatgcccactcccaattccatgatcgaacatcagatttccctcgagacagttgctggatcgcctttcacgatggccacattggtccgcggtgcatgggccctcgtcgcctcccaatacactggaagcgacgatgtcgtgtttggtgagacactcactggccgtgatatttcgctaccgggtgtggagagcatcgtcggaccactgatcgcaacaattcccattcgcatccaggtccgccgatccaactcagtcgaatcctacttgcagacagtacaacaaactatcgtggctcgcacaccctatcagcatatgggaatgcagaacatcagaaaggtcagccaagacgcgcagtatgcatgcgaagctggcaccggactggtcatccagcccgatcccgagtacgtgggtagcgagcttggatttgagcttggcgatgttgtccgcgaggcgcttcacttcaacccgtacccactcatggtggcctttggaatcaacaagggtggcctcagagtttccgccagtttcgatagcagcctgattgagagttcgcagatgcaacggattctcgcacagttggaaaccgcttgcgtgcagttgtctaagggtattgacaagcgcattgatgaaatctcttgccttcccgagactgaattgaatcaaatttggcaatggaaccagactcctcctcttttcgttgacgaaacctctggcaaccttcgcgcccatgcgagcaccaaacagggatcagtctatcctcgtactgtggttccttgggtttgtgatgctcgcaacccggatctgttgtcgcctattggcagtgttggagagctctggcttgagggagcctgcctttctggggaaacagtcgaatcacctgcctggcttgtggctggaagctctgaacacgctggccgatcaggaaaggtgcagcctacgggtgacatggtccagctcagagatgatggaagtctggtatttgttggccgcaaggagaatgttgtaccccttcaaggacacgcggtggatattgcagacctcgagtcgcatttcgcagctcacctcccatccggaactcgggcagctgcatcggtgttccagccgttgagagaaggcactcaaaaagcgtccgagcaagagctggctgtcttcatcgagaatcagccttctcaggaagacagtgtaagagtgatgccggcgaaatacgagatagtgggcgatgagacgactgtatgcgacactattcccgttacacttgctgtgtcattgaagaagctcgacaaatttatccgtgactcattgccatcctacatggccccatctgcgtacgtcgtggttgacaagttacccgctggactggagcaactcgaccacacctcactcaaccaattggcatcgaagattcctcgaaacgtcttcgaagatctccgtggaggcttcaaagaggcatggacaaagggcttagcgcagacaaccctatcgcccacagagaagatcctgcaatccgcttgggccaagatcctccgattgagtcccgagcagattgacgtcgatgacaacttcttccgccttggaggcgactctgtcttggcaatgaaattggtgtcaagtctccgcacacagggacacagcttatcagtggccgatatcttccaacacatgcgtcttggtgatgcagccaaggtgctgaaggtggaccaagcgaaggaagccgctccgctatacaagcctttctccgcgctgaacaatctggatgtcaagatgttcttggcctcaactgtccggcccaagcttgccaacccaggctggcccatcaaggatgtgttctcgatcacagattcgcaagcactcgatattagaggaactattggagcaccacgcacttccatccaatacaccatgctgtacttcgaccaaaatatcgatcgcgagaagttgattagcgcctgcaatgacctggtcaagacccacgatattctgcgcactgtcttcattgagcatgaatcgtccttccttcaagttgtccttgaagacggacatgtccccgtgatcatgcgccaggctgacaaggatattgagcaatacgtcaccgacctctgcacaacagacatcgagtcaaacttcgaacttggatcgccattcctcaagatcttccatgtccaaggcaccgacggaaagcactgtctcgtgctaggcctttcgcacgcccaatatgatggcgtctcactccccagactgcttcaagacctggagaccctatatgccggagacaaggttgtggactttgagccattcgcctcatacatggcacgagttaccgatggacgcctccaaactaaggcaatcagctactggggcaagctgctcaaggattcgacactgtctgtcctcgatggagcctcggcccagtccacagacaaatccatcttccacgagaaggccgtcgaagaattccagcccgtgccggagatcacgacggcgaacgtgctcactgcagcatgggcactggtactggcccgtcgtctgggcaaacccgatgtgacattcggcacggtcacctcaggccgaacgatcgacctagcaaacgtggagaatgtcatgggtccatgctaccaactcactcctgtcagagtgaagttcgagtcgcagtggacagcgatagatctattgcgctttgtgcagcagcagagtgccgagtctgcggcgcacgatttcctcgggttcgagaagatctcgaagctgtgcgcacactggtcatcggaggtacactcctttgactcgattgttcatcaccaggactgggatgatttcgatgatatgccatttgctggatcttcttgcaaggttgatatttccaacccacatggcgatgctgcttatcccttgaaggctgtctcgttcgtgcgcggtgggaagatgcatgttggatttgttggaagtgaaaaggatgtgacttttgtggatgccacgcttgatgagttagctgctgctgttcaggagttgtcgggctgtcgctctgatcccctggttcttggtgcctgaatatgatagatgatatatgatatttttgtaaagcagatagattgagatgatttgaaatttgattgaatgtttttcttatatttcacgtgtcttttctacaaacctaaaggacctagatactcaaacctttggtttatggcttcatatcgtgccttgtatctctttttttccattgcagtgggaatcctcaaattgtggccctattttccaggtagggagaaaatctcgaataatcccagagagaagagagcccagtcaccactcacagaatgaaaaggagcttacaggatgttgctacattaggagataagaatgtctactacggtctgagtgatctccatgcttgctagctgacctcgctggatggtgttgttgtgtcgcactcgtggccagactgcccatcgtgcatatccttcttcaatatatatcttttgaatacgaaaagatgccggccatttctactagtaatagatcataaaaacactggtaaaataataataataataataatagggatatatattaaacaagtactagaaatttaaatcggacatatacttttcaagtcgccactgtctggtgcatgacattcgcccggtaactgtcggaccgcaggagcaattcttcatgagagccagagtcagtgcatacaccaccatcgatcaagaaaatggtatcagccttccggatagtgtgaagacggtgagcaatggcgatgacagtgattccccgtgcggccttttccagaccatcctgcaagagcttctcggattcagcgtccaaagcactagtcgattcatcaagaatgagaagcttgggcttgcgaacgagagcacgagcgatggacaatctctgcttctggcctcccgagaactggttaccactcggtccacagagcgtctggtagccatttggcaatgcagcgataacatcgtggatgtttgcgagcttacaggcctcttgaatttcttcaagggtcactttgtggttgggtcgggcaccgagaccaacattgaactcaatgcttccttcgaagaggacgctctcttgaggcacaagagaaatccagtcacggaaggtgacatccgaggtcttggtcacgtcaactccgtcgattatgatagagccagattcgggtttgtacaggcgctcaaccagggagatgatggtcgatttaccggcaccactgggtccaacgagggcacagaacttgccggggcgaatatcaatgttcaagcccttcagaatcttcatgtccggccgggcagggtaagagaagtgaacatcgcgcatctgcacactcgaagccgtgctgcccgagttgtaggtgggtttctcttcagttgcctcgacatccatggtgtatggattgagccggccacccatcttgtccttgccgatctcaatcaggccaaggattctggacattgccgatcgcgcggcagaaagctcaggtgcgagtgcgaacatctgactccaaagcagggcactgactaggagagagaagacgacaatcaggaactgggtctgactgtagttgccgttgatgatctgcttggaaccccaccagtatgccagtgcatttaccatgttacctaggaagtaggtcatggcttgccagaaacttgcctgcacggtgaccataaatgtctccttgcggggtcctttcagggatcgtcggtaggtccttaaagtattctcttcaagagaaagagaggcgattgtcttgatagaggtaactgcttccacaccgatgtcgacagacttggtgtaagcgttttcatgacgctcctcgaatttgccgaggaccatgagctccattagaccagctccaagcagaaggggtacaagggccaggcagaccaaggcaattctccaggcaataatgtgggtcagaataatggcggcaatgaggttgacggtgatagagaacagggtgccaacgacagatccgctaataccggcaagggcattaccatctctggtaatataggacagaagtagagcaggcgaccggccgttagactgatgccactggagatcttgttcaaacagtgaccggaatgacaacactcgcaccttatagacgatcttctcagagacaaggccgaatcctccccagctgacgatatttgcaaagaactcgatgatcgcaagaacgaagaacatcagaccgtagaagttaccccgtgagctgatgctgtctgcagtgtgacaagggttgagacttccgaccgtgtttccgaaaatgacggcttcgccagagaaggctccgccaaccatgctggaaccgaaaagagcagcaaaaatgacaagcgtatggggcttgagagctggagcataacccttgcaaagaccccagacggatctgacggggccctgaaggtctctattttgttcctcttcctcatcggagtcaccggctggtgcttcagtggttgagacacgggtttcctttgtaggttcatggtcatgtgaaagaccgcccttttcattttccatgtcggtaatagaggtagcatcggacttgctgacgctctcaatgctggcagtggtatcagtcttggatccagccgcagctccgagagtctgcaatttaaccagctcagagtaaggcccattcgcagccatcaactcggcgtgagttccctcttccaagatatctcccttgtgcatacagacaatcttatccgcatttgtgatcgttgacagacgatgagcaatcgtgataacagttcgaccggttgagatgttgttgatagcccgttggatacgctgttcactgcgtgaatccagagcagctgtggcttcgtccaaaatgagaaccgcaggatccttgacaagggcacgcgcaagagagactcgttgcttctgaccaccactgatgagtcgaccactagagccaaccatcgtggcgtacccatactgcaatgcttcgataaagccatctgcatcggcaagcgcggcagcatgtcggaccaattgaacgatttcgacgatttctgggccccgtctctctgctgcggtcataagatcttcaccctctctgacttcggtggctagatcaccgaggtccgttgaaaggagtgccatcttcaggtgtgcatgggctggtttgcttgagttcatcaagccgtgtgcgatgttctccaaaagggatcggtcgagaagggaaggctcctgctgcacaagactgaggaatcctctcaagtcacgggtattgacatcgcggatattgtggccatcgaaagtgatctcacctcccgtggcatcatacaagcggataaccaaacctgcgatggtggactttccacttccagaaaggccaacaatggcagtgtgcttcttgggagcaatagagagattgatcttgttaaggacagtgatctcgggcctggaggggtaaatgaaagagacgtccttcaattcaaatccaccctccgcctcggtgaggcgaatgccctcatcggagtgtccatcaatcaaggatacacgatcaatatcgcttcgcagcttgtggtaacaggcaacagcctgtgtaaacaggtggataaaaggtgcaacttgactcagaagcagggtagctatcgttaatgttagtaaaatatttcacaccaagatatctattaaactgaccttcgaccaagacaaagataaccgtgaaaatagctccgacagtggctcccgcagactcgcggcgcactgctgcggcgatctgtttacttccttgccagaatgcaagaccgtttgcaccatatgagacgaaatacaagacaccggcttgaataccagtggcagacgcctttttcaatccttcggtttccgagtcctttaacgccttggagaacttctcctctagacgagcgttggcaccaaatgcatgcaccacaacaatgttgttcagcgcttcggaggcaatcgacgcagcggaagcagcataatccgacatgcgcccggtgtatttctcgatataataacttccaacaaatgacataatgaagtatgcggggatcaaggacagtagcatcgcggcaagaatagagtctttgataaatgccacgacgtatgcggtgacgaaaaaggagaaactcgagatacagattccgaccttctcagctgtaccggagcgaatggtttggatatcggtattgagtcgagaagcaacttctccggccggcaggttatcaaagaaagagggttcttgtcggagcaggttctggagatacttttcgcggagtcgctgcgccaggcgcgcaccggtcatcgtccagcatagtaggtgaaggtagattaaaacgaattgagcaatgcccaggtacacgatcagcagaattctgctattgatgtccgcttgatcgctggagtccccttgctcgccagcagcttcggcacaggtcaccgaattgaaatcatcgataagttgaccgaatacgataccaatgatggggaaagggacacccgatccaattgcagacgccaggccaacaaagagggttaccaattcgagtcgtgagggattggcagccacaagcagccgagggtagtctgcaaggttcccgaaacccatggtgactcgagaatggcgttcaacactgggattgtcgtttgagtgttgaagaagctaagttcttacaggcgatcaatttatcgctttgcagttttaaaagtggcgtcaccatgaaaattgcacccacttcttagcgtgagtccattcggcgaaactactttagctgggttgcgacaaagacccaaggaaagatgtatgccaagtgtaaagatggggattccaggggatttccggatgtttaacctgccgatttgattttttccactctgccgacatcggttttgacagttggatccgaagatgcaacccacaaggggggcacctgaagaatttcaattatacggacgggggttatcagatcaaaatgggggtttgagtaccgtggttacccttactgccgtccgtacgtgtaagtctgggtcaatacggctatactgtatctataaatcccaagtgtccgtattttacatccggaaaaaatacactatgtatttaataaaacaaagtggagagacggtaattaatacggtacctcaaactctgtcttagagctagcaggacgtcctattggctgatatcttgttaaatatccgaaaagcatattccatcagaatacgtgtagtataacacaatatcattattattcgaacgtacagaaagacaacaaagcccagtgggtcctgtcacatcatcctatctttttaaaaaagcccagaagattatctgattgattggggcaaagcggagtgcataacgcgtttctagggggaactgcctgaacaaggaagctcgaggtggagaacacgagctacccccacttgtctcggaaagatgatggaaatgaattaaaaataaaagaatatctcctgaaattttatacattgcacaatgttaagcttcgccgatcagagtcaagtatgagtcaagaaagctcaagcaaatttacaatttcgcattccacgcggcgcgatcagcggattctaaaggtcgctcacgtccgtcccagaatagtggacacaactggaaccatttttcgcgactgcaaatcgaatggaccgatcgcttatggccgagatcgacgtacttgccaattgtgagtccttgcgcgttctcgtaggacaagatggtcgccccggtggccttgggctcaccgacagcattagcggtcctgggatcgtccaagaaaacatagtggatacagctcgagtaccaggcatttacgcggtgtgcacctcggaagctggcatcgccgacaagagagtgacggcctcggtcatagtctccagcatcgtagtaggcgccatagtgatcctcctgtagacaaggtgttagtgtcaatgccagcctaaagcttgacggagtcgggggatttacctttgaccagtacaactcataatacgaaaagcgggtatcatcgaagcgtccgaacaagcacagaacatggggatcgaagtgcagtttgcgcagatactcggtgtgctgttcaatagttccagtctcattccagcctgcggcaacacgcgggtcattttgccacttgttgaacagctggacgtgttccgcattttgccagtcaacgacttcgagcgagaagtgctcgttgatctcagggatgtagcgactgtaggcaattgatccggggaacggcttagggcggcgagtcgggtggcgggtatatacaggctcctcggggaacttgtttgtcatttggtagttctccggcatgatgggatactgagacaagggctcccgcatggggccgtctgtgccatctcccaccacccagataggacgagggcccaatggagaagcagcaccctgccagaaggcgcttcggagaatcagcaaatcatcgaattgcagagccttgttttctctgtcccgcaggttccgcgggtggtcgattgccaacccggtggtaagaagctcattgcggatgacttcttgccctgtgccggacagggtcagtctgaagtactcgattgttgggtgaccaagataaatggcgtgaacaacgttccaaatttggcccaaagaaggggtgctgttccctgaccactggaaaacagtctggggactgcgacgcgcgcgaccccagggactgttatctgagataggtggttgctcggctttgggaatgaatgtcaagtcaagccatgagagcgagtctgagtgtagctgttcaggcaaaggccggccctttgcgggctgctcgtcaagtgtcaaggtgcgcgtagccggtgtcgatccattgactgtgttcacacgatatgcggtcaggtaagggtgtggtagcttgaccaaaggatactggtgtgatttggaggccattgtcgtagtttctcgatcgtcaaaggtagggatcaagaattccgaaggagttggagtgtcggtgtaagaaaaaaaaaaaaagagagctccccgcgctgcgcaatcagattatatgtatggagtaggtgagaccctcaaacggctgaagaatatcaattaaggagatagtaaccgaggccgaattctctcacatatgtaacgaatggtttcgggatacacgagcctgaatttatcaccctatggggctgttattttcaaacatgtacaataatatatctgtacgttgtacggagataataccgatgtcgtcttgttatggagccaactcccgaggttccgtggaagctttctgcgcccgagctctacgaatgacaatacataatccgtagcccagcccaagagaaaatataaagtcgaagtctaaggttgaattagtcacaatactgtgcatattctgcttcacaattcatcatgtcgttacgatcagggcccttgaatcatgagaatttctatatctctttcccgcatgagcggattgtccaggtcacaatcaatagaccggacaagctaaattgcatcgacaagaagactagtcgagagattgccaagatctgggagcagttcgatgaagatgaaagcttatgggtcgccatcatcaccggtgttgggagagccttctgcacaggcgcagatctaggaggtgggtttcttctttctatcacctgaactatcgactgacggaatcgagcagagtggaacgcaatgaacaaggcaggcgtcgtcaatgacatgtccgctcctggcctggccggattgcctcgccggaccggcaagaaaccgatcatcgccgcagtgaacggcctctgcatgggcggagggttcgagatggtggcgaattgcgatcttatcttagcctcatcatcggccattttctcccttcccgaagtgaagcgaggcatcgtgccagtagccggatgtttaccgcgattgacccgcactattggcctacaacgcaccatggatctcgtgcttactggcaggaacgtgagcgccaccacgctacatgactggggtcttatcagtcaagtggtggagccaccagccgacgttgtccgagcagcaattgaagttgctgaggtcatgtgcaagaatagccctgattccctcattgttggccgtctaggtgttcgaatgagctgggaagctggcagcgtggaggatactgtaacagatctcgcggatcactggtatcctcggttggttgggggtcctaactttgccgaaggcatccaggcttttgtggagaaacgatcaccaagctggaagaattcaaaactgtgagaggaaaaaagtccacccacactacaccgtaatcagatttggtggcgcaaccattttccacagtccgatggcggtgccatggttgatagtggagtgtgtacttatctgatttaactgtaacgcgacgtatttaattaatttcttttttttggaatgtttgggtcaaaataaactgcacgtggtaagcaccttaaaccagaggaagagggatgtatgcattgaagaagatatgtaggaaataactaaagatattttcatagatctgctattaattccaagagtcttggaaatcgtggaaatctcatgcgtgtttcatcgaactccgtttaataccatctcactgtattaaataccgctagtacctagttagtacggagtacatatattgttctccgtactatgtacccactgataccttctacattgtatgatgagtacatatgaccgggtgaatccgcacggatctcgcgtctttagtaagtagcttttagtgctgacccatgacgccccaaacacattgacccattattgtcattccttattaatataggatttttttcttatatctttttccggctgtcggcgtgacaattccattctgcatgccaagcaatgccaaggtatggattaccgcaacaggaagcttccgcgaggtacttgagcttcaagcagttacatccccggttaacattgccctcgcttcgtctctccggtatgagattcatcattcatgcaatcttattagcttctacctttggaaagtcccatcatggctgacgccgtcagtggggtgactagacatggcctgcatacgaccatacgcaaagaagccctagggaggagaggagggaaaaaatacagtttgttcgattattactccgtagcgaatgaacgctaagacatcgccaagacatttcctactggttcatttcacacggcgtgcattagccttccaagattgtaccaatccgccgagttcggtatttttttttaagcgctggatctggagcaccaataaccagggattatatttgctataagggcaaggattcccatgcgcttttgggttcctccaacctactttttatatttcctgatctccagatcaacatgggtgtttccaggttccgatctgccttccggcgatcatcgacccaggactctgttactcaaatccctgtgaccactgatggcgatgaaaagagcaaaatccctaccgaccccgttgctgtacccaacagcgcggaccccgaagttcccactcaagatgcacagcaaggtgtcagggatgtcgaggctgtgactttgagttggacgaggaccatgctgattgcagtctttgcaaagtaagcttttgttccctcgcctcgacgggcgatcgacccgtaaaaaccagcttatttactaacgtgaatcttcaatagcatctggttcttgtacttcgtcaatgctatgcaatcctcgattaactacagtttgctcagctatgtcaccagtgactttgagagtcattccctcctgaatgtcatctacattgttgcagacgccatgacagcctcagtgtacatccccactgccaagatcatggacgtttggggccgtgcagagggtttcctggtcatgaccgtttttgctacgcttggtctaattctcatggctgtatgccacaaccttcccacattctgcgcggcctacgtcttctacagcattggattcggaggtatgacatactgtgtcgatgtcatcaccgccgacatttccaagctcaagaatcgaggtttggcttacgctttcacctcctcgccatacatcatcacagccttcgctggtcccaaggccgccgagggcttctacgaagacattagctggcgatgggcctttggtgcattctccatcatcttccctattgttgcctcccctctttacttcatcttgaagagcaacctcaagaaggcccagaagaacggtcttctagtcccggagcctagcggccggaattggtggcaaagcatttggcactataccaaagagttcgattgtgagtgaagagcttttcaaagcattggaaaattgggaatactgacttgaatagtgcttggtgttttggtgttctctaccggccttacaatcttcctccttccgttcagcattgcaacgtacgcccctaagggctgggcatcaggctacatcattgctatgatcgtcatcggatttgttatgcttggcctcttccttgtttgggagttccgctttgctccgacaccaatgttcaacttcagactgttgaccgatcgaaccatcattggtgcatgcttgctcgacgcgacataccagctctcttactactgctggaacaactactatacatcctttttgcaggtagtcaacgatctcaccatctccgaggccggttatgttagcaacactttcgacgttgtctccggcttcctcttgcttggagtcggtttcattattcgcaagactggtcgctttaagtggactctctacattggtgtcccgctttacatcttcgcccagggattgatgatctatttccgccagcccgaccaatctgtcggttatcttgtgatgtgtcagattttcatctccattggtggatctgtcttcatcattgtcgagcagcttgccatcttagctgccgccgatcaccagcacgtcgcaactgtcctcgcccttctgaacgtcgtcggtaccgtgggtgatgctgccggttctaccatttgtgccgcaatctggaccaacaccttctacaaagcccttgaggcgaggcttcctgcctctgcgataggagacatcgatttgatctacgaggatattacccagcagctgtcctatcccgtcggaacccccgcgagaagggctattcaatcagcctatgcctattctcagacacgaatgcttgctgttggcaccggtctcatgggtctttgcatcatctgggccatcatgatccgcgacattgacctcaagaaggttgctcaggtcaagggtgtcgtcttctaaggtgtttcccttcttctttggagataattttcgacaatgataatgttgatgatccatttcccattatatccaaaccacgactagctgctcccaggcagttatcaaccttcgctttttgtaccttactatttaatcatatcaacatgacggtctgaatgcagagtgttatgactatccgaaacaacgtttctattcttgtaaatacttggcaatgatattgccccgagttttccgcgacctgtagctcgcttggtgtttgtttccgtttaccgggagagccgcggtatggtatgatatggtttggtatgtaataaaataaaattggcactttaaataagttatgcaaatataccgctagtaagtatgtaagtaatctatgtatcaaagtatgaaacaaaaactgtctgcatgtgctttcaagtgaatcttgtgaaattcgagcaatacacaaccataattatgttgagtagcagcttgcagagcccggtgtcatctgacagatccacgtatgactaaagtcatccattcccgaggtccatggtggaaccagggaatatgtaaaaagatctgataagtttcttttccaacgcccttgccgtttttgtacggcactacccctttcctttcggctcaaaccaccctgctgagacgtggctgaggacctcgaaagttacctatcatttcaattagcgaagtaataatagcagctgggattagattgatatcttgggaacatttctcttacaacatgcggagtacaagccgaagttctaccacgttgctaagtgggtatggccgcgttctgaggcgcagccggatgttcggttacaatcttcctggaaatattccgaatggtatggaatctgatgattttatctgatcatctgattagattgggctactggttcgggttctcttggcacttttatctgatcccaaggcgttcggtaggcacgaccgccaagaagcagcccatggtcttctgtggatgtccgggttcggcggacttcatctcgcactatttccctcccattacgtacttcaaaagtagcaacctagtggcgtggccttgactgcttgacagaaaaccttgccaaatgactcacggcttgaatcccaaaggtgtgacatgaggtgcaagtgtgaccaagacttgagggcttcgaggtcacgtgtgacagccacatggtacatcatctagagagagaaagactgcatacccaacgcaggttggcaaacaagtccattaaacctccacttcttcccatatcttgtgtcctttctcccgttttgggattttccagaatggccctgttggaaggtcagatcacatgaccttcattgttcgctcctgctacatagtcttctacaagccttagatagttctttctccacgcagctgagtttttcagtaatgatcaagatgcgctcctccacgccatgaacctttccccagctgagacagttatcatataattattacatgacaccttatgcaagaagcctctatagtatattgcatggatgcagcattaactacctaaatttattcccttcttactcggaaaaccccaccgatggccacatcaattcatttgtggaatatgaaagtttgatccgcgagatgtaggatttgtaaagttagatgggcctacttaagtctgacatttctctgcctagccttcacgatctacctatactgattggaatcaacttgtttcgagcaaagtcgaccgtgcctagcctcagcgatgccaacctgtcaggattttagagcctaaagacaacatcgggtagtatacaaagacctatctgtattcgagattgaagcagctcgatgctaaagaacaagatccaggagggaaaaataagcactatccgctcctcttgtccttctcccttctcaacccgaaatcaccacgtacgactcatttataacgccgtgaaggaaacctgcctcggcatcagatcacaaatttgttcatcgcaatcaacaagtaggatcctttcaacaagcatcctatcaaagcaagttctcctctactaccaacaaggggatcgctttcagccggctgactgatcgcccattttccagaaattacaacaatgacctagctcagagttactgagtttgtgactcccgcgttaggattcgcacattccgtctcgaaatccgcaatggacatcaccctacagtctggggaatagagacatacgaatcaatcaacgaatctccgactacaaagccagatggccggggacattttctatgttgaaattagtataagggcaaaccatgacagttgatggaatccgagatctttcagtcctcccaactgtttgacgagacgctcgtcccgctgccaacctgttggatacccggaaggcagtcacccatatgggtccagatcaggagatagctccgctctcctcctcttctctctcttctgctcccgtgcactttattttggtcgaatcgatactggttgttctcctcatcgcagatacaatgtagatcgatcgccattacaaccctatatactatgaggcgtggtcaaacgtctgggccctaggtgacggcgatggaaaggactgcgagacccaatataaacagcgcagcggcgacccccgctagagaatgaatgagcagtcttcatttcctagtgtcggggacccttgtagtggtggttgtcttggccttggcttgggtctgcgtggtgagacggtaggaaagtgcagttggggtatcggggatgaatttgatctcacagatcctgctgcccctgatctgtaagtggggtgggtagtaaaaaggacaaaggtgaaagtcagtttagtcaaatttcgagtttgaagtggaatcaatcgcaaatcggaagtgaaattcaaccgtaaatagtagaccatgtgtgttaaaaaggtatagagtagggttgggaaagatagggcagctcagtgacaaaaacatggccgttcatgttcaagtatccagtgtcattcataatattcttccattttggtatctatgtcataaaacaaaaaggaacgtgtcctttctatacatgtagcatctctatcgaccatttctcgtacgaaaaaagcttactgcttatcggggaagccgaagtcgacaccgaagggagggtagacaaagcgctggagcttgccctcagcctggagaccatcactgtacttgcgaagggtagccaggtcctcagcgtccaagaagatcaagtcggcacgattagcctcaatgcgggcaggggtgacggacttggccaggactgaggagccacgggcgactagggagaaatcagttagtacgctatattcggtccagtgggtaaaggctagagatacttactgtgccagctgagcaaaacagtagccggagtaactccgcgcttgtgggcgacggccatgatgggctcagcgctgaatagcgggctgccggtactgccaagtgggctgtaagcggtgatgtggatgccagtcttgttgcagaagtcgacaatctcctgctgtgggagcaaggggtggttctcgatctggttgacagcgggaacaatagtggcctgggccaggagttcctcaaggaacttgagactatagtttgagacaccgatggccctggccttgccagtgccgatgagcttctccatatccttgtatgtagtcacatgggagtggctgtggataatgtcccgtgagccatcagcgagcttggggaagatgttgtggtttcctgtgatggaagtcagcgccgcgaatctgcatatttgaagaaattcaactcacccttggggttcattgccagaggccagtgcatcagatagaggtcgacatagtcaagtccgaggtctttcagactctgctcaagaccctcctcaacacgagcgtggaaagagcaccacagcttagtggtcacgaagagatcctcgcgcttgacaaagccggcgtcaatggcctctttgatgccctggccgacttcgttttcgttgccgtagcaaagcgcggcatcaatgtgacggtagccgaccttgatggcgtggaatacggcgcgcgcaacctcgccgggctgggattgccatgttcccaggccgagtgccgggatctcggctccagtattgagcttgaaacgggtatcgcaggcagccattgtggatttatcggggtatcaagagagaaggaagattatttacacagaataagggaatatgaacaaattgaagtagaaatggtcaagaaaagctctggggaaaggcgggggtttacaaaggataacaaccccacacggctatcggggttattccgttcctccaaggtcggccttttttccatcaatcacctcgaccatcttttgggatcttcgatgtgcttggaattttctactgggagagttctatattttttcgatcgacctcgaggagaatgattttccccacacaataaccgtcagaccaggatccaggagaacaagttagcagatctacggaaaccgtcttccagttcgacagattcctctccgcttgacatcacagccactccacatggttggcctgtggtcgtggggtaattgtggctgccaatcatcgtcgcccttttggagagcaacccagatctccatcggcgcggaagccagaatccgtgatgtttgatttttcgtcctacgtgcgagtacatcgatgtcatggcaaatcaggcaaatgaggcaaatggatatggggagagccctcacaccactgctgatatcggaaatctacacgcgatattttgcacatcggattttcctggccttaaccctatatatacactggatctcctagtgtctatccttcttttaaccccagactttcctgattgttaattgcaattcatttggcaatctgaaacttcttatatattctaccaagaaacactacttcatccaacacagtcgaaatggcacctgtcgccatctccccacaggcctcccctgtcttcaagaagcgggatggccacgcactggaagagctctcggacgctatcgacgagatcaacgttctcaaggacatgaagaagcgtgaggctgaaaagaaagtggctgaagagaagggtctatatgacgagtccgagttcgacaaggagaaggacaagaccaacttccgccagtacgaggatgccagcgaccgagtcaagaacttctacaaagagcagcacaccaagcagaccgtcgcctacaacctgaaagcccgccacgacttccacagcaagactcgtgccgagatgaccgtctgggaagccatggagaagcttaacaccctgatcgatgagtccgaccccgacaccagcctttcccagatcgaccacctcctgcagtctgctgaggccattcgccgcgacggcaagccccgctggatgcagctgaccggtctgattcacgacctgggcaagctcctcttcttcttcgatgccgaaggccaatgggacgttgtcggcgataccttccccgtcggctgtggcttcgacgataaaatcgtctacggccgcgactcgttccgcgataacgaggacttcggccacaagatctacgataccaagtttggtatctacacacccggctgcggcctcgacaatgtcatgctgtcctggggccacgatgagtacctctaccatctcgctaaggagcagtcgacccttcccgatgaggcactcgctatgatccgctatcactctttctatccctggcacagcgcaggtgcgtaccacgagttgatgaatgagcacgaccgtgatatgctccgtgctgtcaaggctttcaacccttatgacttgtacagcaagagtgatggaattcccagtgttgaggagttgaaggtatgttttttcgcttctactgatgatctgtgaattcgaggctaacttgtttctttctagccgtactacctggaactcatcgatgagtacttccccaccaaggtcctgaagtggtagacgtctgcgacttgctctcctcgcgtctttattccacaaatttttcatgattccccatttttgcactagttctatgaaaatagctacgatacttgccatcacattcaattagcgttaaaaaccatactttgtcaatcgttccaagcaatcaaacccagaaattacctgaataaattgatagagacgaaattaatcaactcttcaacactatttttcacacttcaaagtagtcaagcttcatagtctagcgctcagctttctcaactctaataatctcacattacaccacattacaccacatacaacttacattcgtcaggacctctttgaggttacggagatgtgaagatatcaaggatcgctactggtaaaggacaactcacttactgcaattacacaatttcccttcgatattaccatatctagagttagaagagtctactttggaccaaaacacaagatcgcatcgatatgtaagtcatgtcatcttcatttggaagggtatgtataagcgttgaacgtatatagggtatattttaaaatccccagggcacatcacaaattatttacagactagccaactgcgaccgtttcccatcctcatcgaagtaaatcttcttctctgtaaccatggactcctgcagcgcagcaccaatgcgaacagccttgacagcattctcaagttcaagaggcagtgccgtgttatcaagacagcaagcagtgaactcattggcctcggtaacaaacgcatactcgaagcgatcatagtagttctgggggatctccctccggacgccggtctcatcgtagatattaacgtggttcattgcaggctggttgttaatcgccagctttcccttggtgccgataatctcagtgacatcctcctggccagcggccatcatgcgggaagcatagaagtaggcaatacggccatcgtagaactcgaccaagccgacggcgttgtcgcggtcgttgtgcttgcgcaagtcgggctcgacggctgtgttgccaatcgccgacactgacttcactttgcagtcgttgccgaagaaccaaagtgtgaggtcaatgtcgtggatggagcagtcgacgaagatgccgccggagaactcggcgtatgcgacaaagaacccgctgggatcgagcttgtcgcaggtctgactgcggagtacggatgcagtgccgattgctcctgcctgcatcttctggtacgcgtcgcggtaggacttgtcgaagcgtcgggagaagccgcacatcaccttgagctctggcttcttggctgctgcgtcgacgacggtttgagactgtataagaggcgggttgttagtacttggtttcaatggttgattctttgtatttggtagactcattgaggttgagctggattcaaaatacaactgacttaccacttcgggacttgtggagataggcttctcgcaaagcgtgtgcttgcctgcttcaattgccttgattgcttgctcggcatgcacagcagttgccgatgcgaccaccacggcaaccagaccttcatgcttgagcatgtcgtcgtagttctggtacagggttacgccaaagggctcgaggtggattttggcccattcgagttcgacggggtcgggggagctggcagccacaagctcagctcggggagtacgctccaggaagttcagggcatggcgcttgcccatacggcctagaccggcacagccgatcttcaatctttgggtagccattgtatataaaatgtaaaggtcaaagaaaggatatcaagaagaaataaaatcaatagctaatagagagggaattctacaactgggcgacttcaagttataaggccgaaactaaatgcggaggtcagtctccgacaactccgcaaaacgtggggtcggaaagtgaattccaccaccgacgaagtcctaaaaaaggacctcgggacataaaaaaaaggctatcaactcgtgaattcactgccgtcggctttcttcgattcccgtcgcaatcttcgcttcgcaatatccactggatccgcaaatccatcacctctcagccaggtcaaagccttgcgtagtcccccaccctgcacggcttcagggttcccctcaaggattgaccccataagcgcccaggacagaacaaacaacaatagttccccgcccttgcggcccttccatagtccacgcttgaccccggtcttgtacgccgaatcaacagcgacccggaagaaccagaggaatgtgctgcgactgtttcccaggaacaagaatggcagaccgcccagtgccccactaaggaagaatcgcttggtaggaagcgttgtgcggggcaagttgtggttcaggagacagacactaccccaggctgagccaattgcagcagagataaccgctgtcatggtgataatacgcttcgaaatagtattcactgacgaaataggctgaagcagaatactcttgaatttggggattgaaagcgccagagtgatggtcgttaagaatcgcgcaagcggcggcacggagaggagaatgtggtgcaagaacgccgtgctacagttcgggagcttagggtgcaagagagcgcatgatagacttgtgattgcagggtgtgctggtccagtgattggagagatggaagctactgatgacggcaaggtgttgagatcaccagggtgtagaattggagaaacgaatgccctgtgtcatattagcgactatactcctgaacacaatcaacttcaaacatacggccagcggagatcagcaatggaggcaagagagttcacaatctcttctttctcgggccaggcgatgttgaccggaagcgactccggtcggccttgaatgtagctcggcgagagcctaaaaatgacttttccaaaccactatggcatcattttagcgaccgtgactcaagtaaaggaattccgaccacaaacattaggcgtagtctcacgatcaaacacgaaagcatggaagagctgggcaaacgagatcggcatcaacagccagctgccgaaccaccacgggcgcctatccagccagcctttcgagtccaggacattgaacaagaactccaagcttctggtgcctgtgtaaatcgccgcagtcaatcggagctggtcctgcggacagatgcctagcgcgaaaccagccagacttgcgccgatcgctggcgcaaagcgcgaggtcagcgcctgcgagacatacgggttgcgctctctgaatggctttgcatcgtcggtgcggaggttcgctcgcaatcggacgaggaagcggtagaggaggcgatggataagaaggagaagagagagagagatggagagacggaatttgggagatcggaagaggggcgttcgggtctttttcctgttggttggagcgactgttagtgcatgcatgttcctaaaagaggcatctgcgtagattaaatcgatcttactgtgaagcgccttggaaccgagtaatcaacagatccgccaacttcaacgcgattccggagccgacaaagactcgcagcgatgagcgaatagcggcttcactgtgtcgattctttgggcgagcgatgacatcgtagcgagatggagatgggagcttgttttggatggtaggggcgcgtctgaccactgattcatggaggaatcggtattctttggcgctgagacatacgcggaggacgtcgcgtaaggcgcgaggtggaaggtccagcgcatcccctgggactggagggttgtccgcagacatgttgttgttgatgccaagttagagcatcatcaggtgaagtccggggctgagaaggtcgagtggtccaatgcggagaagccgacctcggcaattcttacccgttggtcttgccatgacatttcagtattctgtcgatatcacgggttgtagccttactcaccatggaagctattgggtatcttggggatttcagaggccctgactacccagtcacattttgtttgtttctctcgtgtcatctaccgcgagaatggcttttccgcatacagtatctttccgacggggaggtgaagagcgaatttttataacaacacgactttcattcccacagacactatttgaatggacggtataacgagagtatcgggaaagcgaagccacaggacgatatgaaggtcctacaggacctgcacttctggctaggagacatggctgacgcatctcagctttgcctcgagcggatccttgaggccagaatcatcatgaagcttttatgtttctcatccttgttgctataacactaaggctaacaagatactatattcctttttctaggatgaatctgtccgatacgctatatcccaccatacatgttatgttgatgcgaaattacagtataactgaggtccggctcaacacttagatgccaccctgaattgagaaccggcataaaggcatttttcacctttgcccaagagatctgcctcgatatccatgagccggttgtacttagcaactctctcaccccggcagggggccccagatttcagatggcccgtccttaagcccacgaccaaatctgcaatgaaatcatcggtcgtctcaccagatcggtgagacacaaaaacactccagtcaaagctgtaggccaagttcgccctatgaataattagaactttatctctgggggaattgtaggggaaacctacgcctcaattgcttcggagatggtgcctatttggttgattttgagcagcatcgaattgcacgccctcttttcgttggcctcctgcacatatttcgtattggtaaccagcaaatcatccccaaccagttcaactggacattccttgttgaattcggtccaactgtcccaatcggtttcggcgaacggatcttcaagtaaaacgatcggataattttgcaacaatgagcgatacaggtctgtaagctgttttgagctttgcaagttcggtttgtcgtctttgaacccaatatcgtagttcccatccttgaagaattcgcttgatgcaggatcaatggcgaattttattctgccgctatatccagcaagagagacggcttgaaccaagaggtctagtgcctcatgaggctgggagatcggtggtgcaaaccctccttcgtctccaataccggtagcttgagagtatcagtaatggctgcgtaggatccatagtgaaaggcgcactaaccagatgttccatacttctcgacgatgaccttcttcaacttctggtaaacctcgcagcccatttgtactgcttccgtgaaagatgatgctccaacaggagcaatcatagtctcttgaaaagccatcttgttgcccgaatgcacacctccatttaggacattgaagaacggcactggcatgacgaatggttttttcgctccagactcacgccgaaggaactcgtacaatggaatcccctgatatatatcagccatcatgtcgaatcgtcaaccttaattatagcttacagcatgggctgcacccgctctggcacatgccatgctggcgcccaaaatggcattcgcgccgagcttcgacttatttttcgtaccgtccagatgcttaagaaggcaatcaatcatcctctggtctgtatcaaccttgagcccgctctgtactagagcgggaccaatgaccagtcggatgttcgaaacagctttctggacgccctggccgccatatgcagaattatccccatctcgcagctcaatggcttcattcgcacctgtagatgcaccagacggaacgatggctcgaaaggtacctgcatcggtgtaagaaccgagtttagctattgttggtgctctcttacctctgtccgtagtgagatcaacttgaacagttgggtgtccccgcgaatccaagcgctgggcagcttggaccgacctgatcatcgtgaattcgaaatgatgtagcgtggtgagttgatgggttcaaagcttagatgaccatcgcatgagaatgttttgttcttgctattcatcatccaggtacagtaaatttcacaatggcaaggggtgacgtagagtaactataaattaactgtgacaggtgatgatgtcaagcggatggcggttgattctcatagccagatctatagaccaacacttttctttattgtacgcttctgactccaatttactctcgggcaatctgagcctatcgcgatggctcattgtaaaataacttggtaagcaggatatggttgtgattattgtagttactagacagatccatagtatatatactgttcgagcggaaagttttgccgcgcctttcgaatccattacgacttcaagatgttcatttgaagcaagctgcattgcagttttgtccaaattcttcgcaggattgaggtctactgttttctggaagttgtccccaaagatcagctttataatacataaatttccgaaacgagctgtcgctatccggggtatctccttcttgtttgttccgatggtttatatcaaatcgattacccaactgcagtaagctcaccacaaagcagataatctccttcggtccttctactacacaactcggatagagcaactcgaacaccgcatcggtatcctatcgcgcttagcgaaaggagtgtatgcccataatcaagtacgatatgcttgaacagaatctgtgctcaggtcaggggtaactagataaatgcatacctaaatactccgtgcctatggagtccccctaggcatctttatttatgtatactaatacattgttgtttcactgcatatctagatatggcaccaatcaaacaaaagaccgcatgccaaattaaagagtggatttttgtctcagcgccacaaaatctctcgcgataagtcttcatgcacggagtatttggctagccctaaggagtacatcgagaaattcctcaaatcaagtgcttggcgtgaaacacaagcttgacggaactccacatggcttcccaggtatcaattccatatcgcgattggacaataaatattgcagcccagactgaaaccccatgtctcattccgtttacccgaaaatattccgggaattaattattccagcaatgattgttttcagcggggccgtacgtagtagattcggtggagctaaatgtttcggagagttgtcgtagccctaatagatgaatacaacggagcacctaacaattaccatgcatccatggatctcatggctctccaatgagtggtccggctggaaacaggggtcaacaccatgacagatggtgatgttcccgtttcataaggatactagcgcaggggctataaggaggatactgtgcaggccaagcatttaaatatcaaagccaagctcgatggaatagcttattcaaacccatccattcattcttacttcatttcattcttcattctattcggctagttccgaacatttacactctctttacttgtctgttgatcggacatttacttcaaaatgcgtacatctttcgtttccatgctggccctcggcgccgccgttgtgtctgctgccccagctcctactagtgtttccgaactggttgagcgctcgtcctcgacttgcacctttacctcagccgccagcgccattgctagcaagaaggcttgttccaccattgtgctggataacatcgaagtccctgctggcgtgactctcgatcttaccaagctggagagtggtaccaaggtagatatttctgttattcaagggtcgataaccaaagatctaatagctgctgtataggtcatcttcaagggcgaaactaccttcggatataaagagtggacgggtccccttatcagcatctccggctcaaagattgaagtcagtggacagtcaggccatgtcatcaacggcggcggagcgagctggtgggacagcgagggaaccaacggcggaaagaccaagcccaagttcttctacgcccactccctggacgactcgtccatcaccggcctgaacgtcaagaacacccccgtccaggctttcagtgtgcagtccgataacctggtcctcgaccagatcaccatcgacaactcggacggtgatactgagggcggccacaacaccgatgccttcgatgttggctcgagcacctatatcaccatcagcaacgccaatgtcaagaaccaggatgactgcttggctatcaactctggcgaggtaagcagtcaaaggatacttctaccataaaaaaacaaatgaaactaacctggttgtccgccagaacatcgtattcaccggcggctactgctccggcggtcacggtctctccattggctccgttggcttgcgctccgacaacactgtgaagaacgtgaccatctccgactctaccgtgaccaactccgccaacggtgtgcgcgtcaagaccgtctacaaggccactggtgcagtctctggcgtgaccttctccaacatcaagctgtccgagatctctagctatggtattgtcatcgagcaggattacgagaacggcagccctaccggtacccccactactggtgtccccattaccgacctgactgtcgagaaggttaccggcactgtcaagagcagcgctactgacgtctacattctttgcggtagcggtagctgctctgactggacctggtctggaaattccgtcactggtggtaagactagcagtaagtgcgagaatgtgccttctggtgcttcttgctagattgctagggatcaaacagtgatcaccagggcatcaatcagacgagagtgggctattttcaaggcaaatttgactgggtgggctagaagacgaggttaaatatgctactagtccctttggacgtcattgtacttagatagccatctgtagatggattcaattgaatggttttcagcctacctaatagtagctgagaatgactatactgtaaaacaccttaaattagcaaaattcactcgtagattcaatttcttatgcgtctattaatttctatctatgttgtacatattttgtcgcaactaacgccaagctgcacgttcgggaggtgcatggtgatgacgcaacgagttcctttccccaatcagccaaccctcaagcttcttctcttacacatacaaagccacacccaaatcatactcagaatgcatgttcttctactcggcggtcatggcaaagtagcccttcaccttactccactcctcctcaaccggggctggagcgtaaccagcgtcatccgcaaccctgcgcacgaaagcgagattctagagctgggccaaggccacaagggcaacctcaaggtgttactatcgagtctagaggatgtcaagagttcctccgacgctcaaaaaatcatcaacaccgttgtaccggactatgtcgtctggtcggctggtatggcaaccctcacccctcaccccgcacttatctctaaacatcgcaacgcaacgcacattgcaatgagccatccccaaatcaaataagaactcgaaaccatatagacctctataatgcactatggaaaatcaacaattccccaaaccacaaactaacacgcaaacccaggcgccggcggaaaaggcggtgcagcacgcacaatcgcgatcgaccaagaagcagcgaagcacttcataacagcatcatttgcatcaccaagtgtaagcaaactcctcctggtgtcgtacctaggcagtcgacgcaagcagccgagctggatgccggacgatcaatgggcgggtatagtgaaggtccagacggaagtgctgccgacgtacgcgaaagccaagctagaagccgacgagtacatgacagcgctggctgcacagcggaagcgcgagcctggaccggcgcggcctttccaggctatcaatctgcggcctgggattctgactgatcagcctgcgacgcggaaagtcgagctggggatcacgcctaagggtgacggaagtgttactcgggaggacgtggcgattgtggcggatcttttgcttgctagggctgatacggagggatggattgatcttgttaatggggatgagggggttgaagaggctgttgagagggttgcaagggagaaggttgatgctgttgttggggaggatgttgagggtatggtcaagaggttttttccttaaggaacaatttccgggcttgaatctctaggtttctatactagaaaaggcctgggattgacaggatactctactcttcggatcttccatatatcattcaattatgaaaacgaacgtgaaaagatataaagtttatatggtgtgcatatctaagaaaacatattcacagcttggctttgggtgcctctaccacccccttgaacttctgcttcagaatccgacgcaggatcttcccactagggttcttggggatctcatccacaaactgcacaccaccccgcagacgtttgtggctagtgaccttgctatccagccatttgataatgctcgctgcttcttccttttcgctccttccagaagacttgctcttggcgctgcgaacaacacaagccataggaacctcggaaccgtgtgtctcactctcaataccaataacagcaacatcatcaatagcatcattatcaaccagatgtccttccagctcggcaggaggcacctggaaacccttgtacttgatgagttccttgacacgatcggtaatgtagaaattacccttggcgtcctggtacccaacgtcgccagtctggaaccatccgtcctcagacaaacagcccttagtagcctctgggttctcgtgatagcccatgaacacgttaggtccactgacgtacaattcaccaacctcgccgacggcaacttccttgggttcggaaccatcctctggcatagtcatatacttggcttgcatattaggcatcaagcggccgacggaaccaatagcctcgcgccaatcctcccaccgctgggagtgtgtggttgggctagtctcgctgagtccgtagccctgtttgatgccaaccttgatgcgggagtaaactgcctctaccagctcatgagtcagcggtgcagcaccggagttcatcatgcgaagacttgaaaggtcatatttgtcgaccaccgggtgctttcctagcaatagcaccactggagggacaatgtaactgaacgagcagcggtagttctgcacgtgagcgcaccatttttctatgtcaaattttgacatgacgaccaagtggtaacccttatataaagcctgggcaagtaggcaattcaaccctagagactcacagttagtatcgtgttcatccgagcatctacgcgattgaaagctataccatagatatgatagaacggcaaaaatgccagtacccgatcaccctttccgtcaggaccaccattccaactaaggtttgccccttcagcgatgtactgctgcctaatattggcaacgatattccgatgcgacagcatgacacccttaggcacacccgtagtcccagaagaataaaccaagaaagctacatccttcgcgggagtgaccttctgcttgcggtagcgagtagcaccagagatattgcgcacagagctaaaatgcttggtccgcacatcgggatcccgctggtccccaatcaggataatgcgatcctcggacaagccgactttcttcgcagcttcccgcgcaacagacagcaccgaggcctgcgttacaagtcccttggcgttagagttcttgagttggaaggccagctcgtcaactgtgtagcctggattcgcaggcgagataattccgccggcccaaagtgtgccccacatcaccacgggtgtgtcgatgctgtttggcgtgaagagggccagcacatcgcccttgcgccactcatacagagctttcaggcccttgccaaaatctagcgaggcctcgcgtagcgatttgtatgtgtaatggcgctgggtatcggcatcttgatagataactggtgggggtcagcatgaagaaaattcaagagaaatgcaaatgccgtgttcaacgcagcgcaccactgggttctcattgaatatcacgcactcttatcgtcggggtaagccctatccttgcgctcaaatagaaaggtccagaggtccacttctgggatgtcgaccagagggtaattggaggcgacaggcattatggaataataaagccaaggattcgatgccggggaatgtgatcgaggctcaaaaagactgtcaggtggaagacgaaagggacgcacacgagcaaccaagtatgtacttaaaagaggtgagatgggtctttctccgcaatctcggctgacggcttgcctcggtccaatatcgcgggggcccaagccaattaaaaactgcttgttccttgactcttcggcattagattggaggaactgaaagatccaatcccatactgttcactgcatattccgaataatcatctgttccgttgaggttcatgcaggatactcattgatatccttgacatccatccttgatatcggcactcagagacctcgatctcggcagtttgacagagataagcaactacttcaccgaatgccggatgaaaccttggaagatagaggaaagacacttttatagaatagctcagatagaataataataaggtctggtgaatggaacatcgcaatgtcatgcccacctggaacctcacaatttgataagcatcagcttcaaaccttcgaagtcaggtaatttgatagtgacctgaaacagtttaatgcaagactataatacacaggacgacgtggagcggcctactcattcgggaagagaccgttgtaggaatatatatatgtgtagctcgagatatgtgtccatgatagcgatgcaaaggtatagaatgtgctgccaatgattgctagtttatattccattacatttacatacaatgaggctcaataaataaataaattggatacccacgatgcccccttccccagagtaaaggtagcggagcccaatttgtggaacaattcacagtaatgtgtacaacggtgcagtccccatgaacctcacgacctagacgtagggaccatgagacgggcctgtcgggtgctgtctagtctgcccctcggaattacttggcctacaatgtgtctggaaatgaatttgtagtgtcgttagatttagactccttccccggcgacacaaagcgagacgagtgaaggagtatctttttgacctcgtcagattcgacgagggactaaatccagatcccaatatgatttcatgccgacaagatcttaaattgagttggaaacagcggacccagactggaaatacatgctgaaaaaaagagcccagatgagagttttgctgaattccatttttgctttcccagcaccatttcctccacacgccactccgaggggaatcgtttgaaatcgtttacttgaggggaatgaaacgggaagagtgggtggcaccaataccgggacgaccgtgcttgacgggcttgctaggaggttgttagtgtgctgatgttaaatggccatgcgaacaattcccgggagcacatactaagagatagagaactcagccaagtagtgaccaaccatctcgggcttgatctcaacctggttgaactccttaccggagtagataccgacaacggagccgatcatctcggggacgacgatcatgtcacggaggtgagtcttgacgagatcgggcttctcgttgggcttggcctcctgcttggccttgcggagcttcttgatgagacccatgggcttgcgcttcaggccgcggttgaaacgtctgcgggcacgggcgtgaacgacatcacggagctgctcggaggaaaggtcgaggagcctgtaaaaggattcagtcaggataatgtccttgcttgtttatgatccctgttgtccattcgcaacgcagcgacaaagaggcgagaataaagatgccatatgcggttcatccataatggttgttgacattgtaaatgaccaccttcaatttcgtctcacgaggtactggctgcgaatggatgtccaaggattcgatgattggtaatgtaaacatactggtcgaggtcaatgccacggtaagaaaacttgcggaactgtcttctcttcttgatctctgctcggcgaaggttcagtcagcgtctgcgatcttgctgtagtgcgtatctcccatgtccatgtcgttccccgctaacgtctttcttcaatcatctccgtatagtcgattgtaatgcgcgccgtctcttctcattcgattcttctgtccatgggcgatgggtagggatgggtttgcttgttcataacgtaccggcagcctcctcggcgttctagatgaaaactccatgttagtgtatcgcacgggcttgaagggcgagggcgaaaaactcacgtattcgatgtcagccatttttgcagatattcctgtaaaccgcctttcgaccgtatctcgaaaagcgaaggagatgggttgtcggaaattgtcgtgtcgctaagcggtcgggctgctaacacacaggctgtaggaggtgggcagcactcgttaagcgacgggtaggttccaagccctagacactataccctttcgggtgatacgtaatttactttgaaacattggttttttctttgtaatcaaactctttgtattttttatttacttgactttgcttggggaaacatcagtagcgtttgtaccatttgtgtaatttatttgtattatgataacccattcccatgatatggcagaatcggaggctgttgatggtccttatcaaagtacaatctgagtacgcttactccgtagttaccatgacgtggatgattgaatctctagttctccaagagaatttgacacgctaactttgagagcgggtctcggcgatcattcaagaactaaatttacgcattgagaaaaagttgtagcgaaggccagacgaattgtattggctataagcttattccagctcacatgaagagtcgcaactgtatcaaaacagtctcaacaaaacacacttgagaagccaaccggcgcaaatcttgcccggactgacgaaccaaccaaacatctgttccccagaactatgatttttaggccttggattaaagcgcttaatcgaagagtccgaatcccatatcctcatcggactcctcctcctccttctcctccttcttctcctcagcaggagcagcggcaccaccggcagcggcagcggcaggggcagcagcagcaccgccaccggaggggacggaagcgagcttggcagagccctcggagatcagctatataaagagtcagcatgcatttcaggtaatatatatgcgcttgcgagtatcactgaccacctggaggtccttgtccttgagctcggagatgaccttctcgacgcggtcaccctcagcgtcgataccgacggaggagaggacagccttgatatcggcggcggagggggcctcgttgccggcgagggcgaggagcaagtaggcggcaagatacttcattttgaatggactggaaaaaaaatcttcattagtatcgaattcaagatcgaatgcgatcgtacttttcaagccgcaaaatcggctgagaagcacataaataaagtgtacgtaccgttggtgattattatctgaacaagagaaacaatcgatttaaccgcgaattgggcggagactgcaacgtcgagttctggtggaagaggttggttgacgaaggattaaccgagtgctcaaaatcttggaaaaaaaggtggtgcgagtgggtgtggctagtgttggcgggacttctaagcgagtgctgtggcgcggtgtattcgctaccacgtgacctttgcatatccggccttgataattgcatgctggcccataaacctgtctctcttctctactcctctactgagtacataactctcacttcgaaagctcttgggccaagtcaggcgtgttcttcacatttgctacttctgttatcttggaataacagaaaatctggagagagccaagccagagatctattctcatgctatcgggctcggagtcatgaagttacttagtcgtaccaaatatcgacggtgagcgacttctttttgtaccactcttcgaatccaggatttaaatcctcgggatatctctcctataatcaaaatgagtgtatggccacctatctttctcttcgtttcacctcattttgactgacatagcatagttcctcgattccattctctcgtctatccagacgggtaagccctcccaacttccggtgactcaggtgcctacctcgcctacacctacctcgcctgcgcctgcttcaatccccaaaaaggaggatcgcaaaccgaccgctgtgcgacggccgccctcaaccagcgggaatgtcagtggagggatcaagcgcaaagctgatgaacagctgcctcgcccaccaaaaccagaaaacaaggtggcaaatagctccgccgcaatgaggcctacacttcccacgaggccagcggtatcatcagtaccacccagagttgtatccaagccaaatcttccgaccacctccaggccaaccatgcctaaacccacccccaaacccagcttgtctgcgacgccaaaagtgatacccccacggaaggagcccgaccccaagcccgcatccgcaggcgctgccacaacctcgaagccgccaccaaagggatcatttgcggagatcatggcgcaggcaaaggctaagcaagagacggcgcctgtgggagtagggttgctacgacaccaacccggctccaaagaaagacttaccaaagtggagcgcaagcggcgcatgatggaactccaggccaaggaaaaagaagcgcgtttaggtaggaaggctggatccggtgtctctgctaagggtaagcctgctgtccggcagcgcgattccgagggaccctcatacaaggggacggccaaaccgacgcaaactcccgaaccgcttacctaccgtggtaccgcgggcctgccgtcaaatcgtggtggaaatgaccgtcgacaccagtctcgcaaccgacaaaatgaatatctcggaactgacgaagaagacgagggcgacctcggtggctacgacgattactactctgatgcgtcgtcggacatggaggctggaatggatgatgtagaccgtgaagaggcggctgcattggcatttgctaaacaggaagacgagaaagagctacggcaagaaatggcggctaagaaagagaagttggagcgccagcggaaattggccgctcttgcttctaggagcaagcgttgaagtttggacattttatacagtcaactggtttctttttttccttctgatcactttccttgatctcttttgttttggataggactacatgttaactccgcattatgagcgttcggggtgtccatagacggggatgccttcatttttttttgctttgaagcaccatcaatagcgagcgctatatcaataccaactttcttttcttttgactattgttctgtacattgtagccaatattcaatattgaagtcatcggcttgatattacaaccccggccccacttggcaggtgacatcactcgcgttcacctccagcataaccttgaaagtaatcttctacaatttcacaatttcaccatttcaccatggagtcagttcatcatgtctcggtctcatcgaagattctcttcagcaaggtgcgcaagattgtgcctccaatgctcgaaaagttccacaaaggtctgttgattatgttgataagtcgattgaagctatcgaccacgcaatgaaaatccccgctgaccagtagtctaggacaactcggccgggtagctgttatcggaggctgcgttgagtaggttgtctgcctgttgacactggtatcctactaactggtataagctatactggggctccatacttctcatccatggcctctgcaagacttggtacgtttcctaaacaggcccatgctctccactagatatattgactattgaattgcagggtgcgatatggtatgtgcgaaagatggcataccttatgcaaacgactaacaaccaccagagccacgtactctgcgaacgatccgcagcaccagtaagctaaaatccggccttgattgaacctactctaaacatgtagtacacaggttatcaaaagctactctcctaatttgatggtacacccattgcttccaagcagcgacactgtcaaggaccccaattcgattgatgcaccagcactggcgggtccgatcatcgcgatgttatctcgcctccatgcacttgtgattggaccgggtctcggccgcgatggcgtgacgctaaaggtagtcgcggaagtgatcaaagaggcgcgggcgcgatcgatcccgtttgtgctagacgcagatgggttgctgattgtggcgcaagacccgggcctggtcaaaggctacaaggactgcatcctcacgccaaatgtggtagagtttgggcgtctagccaaagcgctgggtgtcaaggtcgtcagccaagcggagattgcgcaaggcggaaacggcgacaccatcagcaaagcatcagatgagtgtgagcagctatctcgagccctgggcggcgtgacgatcattcaaaagggtcctcaggatttgatatccaacggggttactagcattatctctgataacaagggtggcttgaagcgcagcggcggtcaaggagacactctgaccggatcactgggcacattccttgcttggcgagcggcttatcatgagaaagtgtgggactctggggagcaggataacgagaaggcagcgcagagcaaggaagatgttcaagcagagctcgattctgagaacaaacgcatgtccccgacaacgactctgctattggcggcttgggcaggaagtagcattacacgagagtgctcgcgacgagcctttgaagccaaagggcggagcatgcaggccagtgatttgaccgatgaggttcacggggcgtttttggacctgattggagagccagaagggtctaagacgcacctctaggctaccatataaaatgctactagctattcatctatgtacgagaaagacagtgcagcggtatactccggagcatatctccatgtacctaagcccagctgcatgtaaacccacggcaatgaaacatgtctcgtccacttttatgatggctctcacaagcggtgtctatagttgccaagaagaatagtctcgaaccctgcatatcttagtcaaaatctgtctccgatattgcaatctcgactgcactgacttacgtggtgttatatcgtagcatagggcatcttttcttgcattttacctgagataaagaaactgctcatagtatgcgaatctttcagccttcaataatccattatcaacatggtcaaaacccgtcttccggtgctgatgcttgagactcgggcctgagtctggtcccagttaccaaccattaggtgaaaatataagactaccagccaataaaggtcgtctgacaacacgatatcatcaccagactcggatgattggttttgagcgggtccaacaaggattaagtgtgtcctggttggacaccttagacccttacccttgatggcatgcagagcaatagaaaccaaaaataacatgtcacaagccctgcctcattccagactagcctatgcccaactttcgcggtctcgcttgttttcacctgcctttatcaggttccaaaggtctgcagaagacgaagtcatttgcataaaagaatgcccagcttgtaaccataaatttgcaagcagtgtgagacatttaccttggcaagtcaaaattgcacattctatacggccgttgacgtcgagatctgaatgtggctagagggatggccctgagacatgcaccccgcctccacccttgctaattcgatattccaaaacctaagcagtcttaggcgtgctgctcaaaggcaatgttgggctaataagccatcgacatcaccttggccgatgaacattggtggtgttttggggtattgttccagatctcgtattcacgcccaaccccgtaccgtatatggctataccaggaaacccaggcggaaaatgacctcgtgatgcaacgcagggaacagggtgaagaacgccttctacaacaaaggagaatgaagcttaaggattcgcctaagcatacagatccttggaaacgagtatataagatggcgaatctcccagcaaaagataacgccatcagaaaccaatccccagacacaagacaccagatctacaagcccaatcatccatcaatatgcatttccccatcatcaccttgatcctcgcgactgcctccctggtggccgctgacccaacatcagggccccagtgtggcacctgcaaccccatctcaggcgagaacggatgtgacccttccacctcgtgcatcaacacgggaacatccttccactgcgcctgccgcgctggtttcaaggcatctcagtacaacaacgacttgcaccatcagttccgcctgccgatgccgaactatgaattccttgttttcgttcctgagtacacggcttgcaacaccccgtgtgatgatccgtatgctgctccttccgatctttgcaacgaggtcaggcttcaacaccagtgcgcggcttagaatattggtccgtggtgggagtggtcaaacaagatagaggggtagtgcagtaggctcaagcggaacctatagcgagatattctggcgggttttctggcggattgcatgtgtacatgggtcactccttaatggaaagaatttgctttagtggagaattagcatgtaaatgtagattaaacaagtagactgagaagatctttcctaattcatctcacgaaatcataataaccgactccatttccccatgaatatacccaaacacccgtcgccttaattttagccagtttcacatgcatcttcaacacgtacaagaagtccgacatcaagaaaacaaaaacaaaaacaaaatgtgagactttcacaattacatgtccatatcgtcatcgacttcagtgaagagcagacgcgtgccgttgccagtgacttgccagagctatagagaacattgttagtaaaaaagcacggtacatttgggagttagccacacttacgttcatctcggcatattcatcgatagtcatggtgaggttatcttcagtgaagcctcgggccagtacacgctcacgaatacgtctcatgctcatctcgccttcctctccatctccaatggcagcggcaccactctccttcatactacggatcaaattgtagatcttgctagatggggtgttgtcgctaccctgctcgccctcactgtatagagaagccttactgatctcaatgagacgcagagcctcatcgacatcctcgcgaacaacctcctcactgaagcgaagacgagcaagtgcctgcgaaagacgaacaatgccgagcagagtacggggactgacatgggaaaactgtctcttcttggactcatcgatcttttgtctcttgcgcatggccacataagcaccaaccatgtaatcggaaacattggtaggcacaataggacggtagctgcgtgccttggcaacatactgacggacctcgtggggagtgaatagcacgccagcttcttcactctccgggtgcttgttgtgcatgtggacgtaggtgacgtgttgggccagctcctcgtcgccctcgcgggacggggtatccagaagcaggaacatgacatcaaaacgagagagcagagcggcgggtaggttaatgttctccacaggtgacacccgagggttgtagcgaccatatagcgggttggccgctgcgaggatggaagtgcgggcgttgagggtagttgtgataccagccttggaaatggagatagtctgctgttccatcacttcgtgaatagctgttcggtctgagtcctccattttgtcaaactcatcaatacagcagataccgttgtcagcgagaacaagggcacctccctccagcaccatctcgtctgtgacgggatctcgcatgactgcggcggtgagaccgacaccactgcttcctcgtcccgtggtgtacacgccacgaggggcaaccttagtaatgtatcgaagaagctgggacttggcgacaccagggtcacccatcaggcagatgttgatgtctccacggatgtgcatgccgtcacccatctctttcgtgacaccgccaatcaagagcaataacaatgccttcttgacatcaaggtgtccgtagatttcgggtgcaatcgaccgtgaaaggtactcatacatattaccggaacgttggtgttgctcgatcttgcgaagagtacggctatccatacccacctcattgtaggacttcttgtgctgtgtgatgtgctgggcatccaagtatgtgtcagtcagcaggccggcgcgaatagcccggaaaccagtgtagggagtgggcaagaagatgcctgccacatcgataacgtcgccggggttcagttgacgagtcagagcgccgtaacagtgaacagtcaaagcgcgaggaatatggcccacagggacctggtcggccatttcctggatcttcacttcctggaaaggaacaaacttcgatgcacgagtcgacaggaagagctgacccttcgagttgttcttcttgcattcctccgacaaacattcggtcaaggggaggaattgcttggtggtgatgggctggaacacctcgcaaccacagcgatcgcaagtgtaggcgttgatctgtacagctggcttgacatctgagacacgggtggtgataccgcggactgtaatcaaggtgccgatgtgctcaccgcgtacataacggacggcgagagctttggaatcgcgctcggcgctagaccctgagggtgtgaggggcttgaagttgacagtatatctgcgggtgagctccggagggaacatcgatggggcagtcgcagcagcttccatgtcggcctccatcgcagtttccatagtctcattccgcttctcgcgttgagacatgatcacatcaagcacatcgtctttgaatctgcacgataattagtttagcagtctgtgcattcacatataaacagatttgacatacgtgacatcctttgtctccctgggcataaccgcatcaatcgcttgagagatgacatcgatatagcgttttgtgttcttttcgatagattggacgagcttcaagtcttctccctcgggcaaggatttctcgaactattaccaacattgtaagctagagtttagtcagaggggctcatattgatacttacaattgacaggtcatccaactcaatcaagatattagatttatcccggtttgcgatatcctgcagaatttgcatgtacttgagcttcggctcccggtgcctccttgctcctcgggtgtttgccccattggtctcatcggcatcatccatgaaatcatattcatcactagtcccgtcgtcgatgttcagatcctccaatgcctcggtcgcagcggcttccgaagacgattggaaggtcttgaaccccttcaggaaatccttgaagctattcagttgcgcggaataatccacaggcggggggtattgaaggagagacataatagcaaagtgcgctcaattgaaagcgcaaagaatggatagtgtgatcgggagagaatataaggaagagggtccgtccagtgtctatcggagccccaaattcgctgggtaaaacgcgaacgcgaggtcgggacgcgctcaaaaacgggactaacccatttaggaaaggtatcaattccgacggattatcactttatccgctaacaatatatcacatgactcgtcatcgggccgaggcgaaagagagatgtagtgtggagtccggggtcgcgtttctacgagttcacgattcgctctcctccttgtctttccggggtccacgatcgttcagcgcttcaaaatggcgcccaagaagcctgctgcgacggccgaagtcgcccttatccccctaaagaactgtcttgttaatctaccgccgtcgctggtcgccctgctggtcaatgcaaacacggtcagtctgctagttgttctgtttccgtaggttatcttcggctaacttctagctataacagactgctcagaatgttattatcgaattacaatataaatcgacctccggaaaggccaatggagctcctccgcagcaatcatgcttcctcggttggacgggtatgccgagcaagcgcaggcttgcgcctgtcgttgggagggacggtatcaacagtggatattccagggagcaggaagtatccaccgttgagcttgatactacttttgggcgactccttggtctcacagaaggccagaaggtacaatactccccgtgcgtcattacccacgtggggcgctaacacttgcaggtcggattgttcatccacctcgatccacccgttgcacatacgataaacatcgagccattgacaccagaagactgggagagtatgtacaagctacaagcagctataattagagtggtacttactcgatataaccagtcattgagctccatgccacattcctggagcttaacctcttgtcacaaattcgcgctctacccaatcctacatacaatgcggctcaatcgatgcatatgcacccactcgcattgcatctctctcccacatctaccgccaatattgtcgtcacttctcttacacccgctcccccagatacctcccccttcgccaaaatcgcgccggatgcagaagtcatagtggctcccaaggttcgatctaagacgagtaaaagctctcgggctgacagccgcagcgctactggtagcagcaggaggagtgctggtgggaggagtgcttcgagcactgtacgcccgaagagtggtcggtccgactccagtacacgaggctccctctacttgagaggcgtagaccgctcagcgaccactcaatattttgacgaggaagtagaagatgacgcaaatcagggccttcgtatttgggttgatccggatctgctggctagccatgagctgcgcggagcgacttgggcatgcgtgtcggttgtccagccatccggtctcaaacccccaccagatccccaacagcaacttgctcaggctgaacagcaaaagtccaatgattctggtgcccctgcaaccaagctcgtggctaaattgtttccatgggaggaggctcctgacaatcggcatgtggcgctttccaccttgttgtgcacggcccttggtgcagagaacatggttggaggaatcatccgagttgaagcagcacccccaccactgcatcgctcggcagtcaagaccctcaaagtctatcctttcataggcgactctttaaagaagaaggacgggctgaagttcggtgccgacactacggcatctcgcgatgccctagccgagcgcctcaaagtcatctacggcagcactgggtccgacacagggctgttctcgggacctttgactgatggaatgattatacccaaatctgactatcacccttcagtctcttcgttcgatggtgctattattcgctttgatccccctttgaagggagctcctgacgaaacaaagtcaatgtttgggtggttgctaggctccgaagccaagctgaatcttgaagtgcaggctgaaatccccaagccatttgaccctagttcgcaggcgctacctatggaggaccctcttccagaaactgcccctgaattagtagggattgattctctcattgaacagtcattgaacaatctaacaaagtcgtcgtctatcttgctgaccggtggtcttggtgccggtaaaacagctcttgcccatctactggctcatcgcctaagacgagatcatctcttcaatgtcaagtatttctcctgccgcaagctcgtgacagatgaaacacgtatttccaacatcaaagagaccttgaatcgcctcttcatgtccgcatcatggtgtgcgcgtcttggtggccagtcagtcgtgatccttgaagaccttgacaagctctgcccagcggagactgaattacaggtgggtggtgacaatggccgcagtcgccagaacagcgaggttatctgctctatggttcgagaatattgcgcgctgaattcctctgttgtgctactggccactgcacaggccaaagagtccctcaataatgttattataggcggccatgtcgtccgtgagatcatcaatatgagatcccctgataaggaaggacgccgaaaggttttggaaaaacttactagcgaagataaacccacggagagcttaaatgggcatgtgagggccacaagctcctcaacacaagattcatggttggacccttcaaatccggggagccgaccaagctcttctgggggtgatggatttgttattggaagggatgtcgagtatctagaactggccggcaaaaccgatgggtatatgcccggtgatcttgtgcttctcgttgctcgtgcgcggaatgaggccctcattcgctctgtctcagatctgacagcaacatcgaagatgatcactctagggttagaggactttgaaagtgccttgaaggactttaccccagcgtctcttcgaaatgttactcttacctcgtcaacaaccacattttcgtctgttggaggtttgtttgaaactcgcaagatgctgttggaaactttgcagtatcctacaaaatatgccccgatcttcgcacagtgcccattgcgactgcggtctggtttacttctctatggattccctggatgcggtaagacaatgttggctagcgcagtggctggcgaatgtggattgaacttcatcagtgtcaagggtcccgagattttgaacaaatatatcggagccagtgaaaagagtgttcgcgatttgtttgaaagagcccaagccgctcgcccttgcgtccttttctttgatgagttcgacagtatcgcacccaagcgtgggcatgactccactggtgtcacagaccgtgttgtcaaccagttgttgacacaaatggacggcgcagaaggcctctctggcgtttatgtgctggcagcaacatcacgacccgacttgatcgatcctgccctccttcgtcccggccgtctcgacaagtcccttctttgcggcatgcccaaccatgcagaccgtgttgatatcatccgatctgtgagtgaaaagctcaagatgagtgacgaagtcacgtctcgctttggtgatattgccacccagaccgaaggattctctggtgcagatctgcaggctgtcgtgtataacgcccatctagaggcagtccacgacacgctaggtgaccgttctaccgatgcagcgaagcccaattccaagtccaactcctccgccaatgcttctagcaagtccttcatccagttcctctattcctcttcagaggaagcatctgggtctgtctccatgccagccccagcagtgatttcagccaagctagaggcaatcaagaactcacgtcgccgccagcgccagctcgagcagggactttccggtgcgaacaacgccgcggccccggtggctaacggcactgagcccgatgcagacgagctgcatgaggatatcatcgtccgctgggaacatgttgagcgctcattggcaaccacgcgtggttcccttcccccagctgagcttagacgtctccaaggaatctaccgtgagtttgtggccggccgaaatggcgagatgcccaacggcgaggctgccaatgagattggagggcgaacaagtctgatgtgatatattttatgacttgttttgtacactgtatatatgaacgcccttgtatgttcgattgattatttgccttctactcctgtatttatcaatattggtaaatggaaacgtccttatacatttgagtctcgtcttagaggattattagatgagaaagggatcaagtttatcgcaccgatgttggcttgcttgcggcaattcatgaagctttgccttgtagattgggttgctttacaaaagttgaagtactagtagcttagggaaagagaatatgaactagttatgttcaaagcggaccgcaagcagtcacagtatacataaacacctccacctcaccgtggtgccgtgggcggctaccgcctacgtgacccggcagcccatattaggaggaggcctggaagtaggggagactcacgggcaagctttttgccttgcccaatacggtttgtaggtagtcggctttctcggttatcatggatgtgtatattttgatttgttctctcttgctgtcctggagaaagctatatactctctcatcagcactaggggcttgtctgtctagccgacacaaagtccgtcacttctgttctaagccgcgagtcttgctcattatcttctgtctttccagacaatccaaaacagcccccagagtagctagtccaatcaccccacagcagccagtagcaatttgctttttccaggtattgggatcactgcagttctcagagcagacaggataggttccgtttgtagtcattttggcgcgtctggcatgatagctattttcagcagtccacatgtgagctgcgacggggcagcgcagaaaagacgaattcgtaaaagaggaggtgttgcatgggaattggttcatgtaaaggctggcgatagcggaatatcgtagaggtggcgaaactatttcggtccttgagagtcagagcttgaagtacatatgagccctggagaggcatcagactcaccatactgcgtgcacctcgtactgaaaaccagaccaagccccggagatattacctaaccaagctccaactgtacatcgatgaatcaacattgggaaccaaactataggtggaagagatgaaattaccagttgacgagctcgtacccggtggtcaaaggcaatctttattggatctgctattcttgacttcctctgcatggttcgggctgcagaaactatcgataaaggcgtttctgatagctttcggcaccaatccagggagcagaacttaaagccacgaggcctatatgtcatattgttaggaatcagaactgaagactaaaccagagagacacaagccttaccaatgggcagtcaactcctcctcgagcatcagcccccacactacagaaaccccccccttaccatcttcaccgaaagcactagcagaaagctcacccagaaaaaatccaagttcacttattggctagctgccgaactctggctccagccaagtcaccagcacaagcgacacccagggaccctatcagaatcaaaagtcagctgagtccaatccatcttagatagaacatgtgaagcgagaaagaagcgagaagaactgggatggaacttaaaccaagaaaacaaaggctggaagaggtaaaaattaagttaaatggacttaccaacgtcgccggcgcggcagaagactcggagcatcaccacggatcaagattggggcgggggtaggcttgccccggcgcgccgcaatcgagcccatgagcgcgcgagcctgctgtcgctgacggtgggcttcataccctgggatctgctggtaagtggggggaatcaccggaatcctaatgtcggcaaaccaggaggtcgcagcctgacggctgagcccgtagcgggggtaactacctgtctcgagagagacacaaacctcatcggtagaacgggaagtcggaggtccattctccatggaccagaggcccgacaaggaaaccatctcgaaggcatccattttgcaagttgttttggttatcaaattgcctttgtgtgcaatgaaaaagaaggagaaaggaagagggaaagtgaagaggaagtgaagggagaaagaaaaaagcagaagagaagagaaatgggatgggatgcgggctgtttacggcccaaagaggaagggtcgaccgacttcagagccgaaggggcgacaaagtatacaaatggcatcggctcgtagtcgctcctgccatctcatgcataagaggtgggggactattaagcacgcgggcactactgtcttgttatgggtctattcaattagggctggcggtgttgcagtttgatcgaattttgtagaataaacaaatggcttagagtatttcactctttctctagagccttatcaacaagacgttcaagcttgttccattcagcggagagaacagctttggtcttgctaggatcaatgccattggctttgaactcattgtgaacctgcagaaactgatttccaacaagcctcttgaagctaggcacggtgcagctctccgcttgggtgctagtaagttcggcgagaatgtaccatatcaagtagtgaaagttcagcttgaagtcatgaatctggacagggtctttggggtcaggttggaagccctcctgagaaataaaaacagtaagcctgactaggctccatgcatggatgtgtcggattggatgggctttgtcatagacaacaggatcaattcgcaggtatcgaatggcagcgtggatgaatgcccgggtgaatttaccagccgttagcagagatatgatgagcttgtcgcgcagagaagcatatggctgacgggtgagaggccatagcgcagtttcatggagcttgtgcatagcagcttctaatttctcgattgcgtctgctggctctgtgctggttgctgttgctttctgcatgagttctagggcttcacgctctgctgtctctagggaagtcatgtcttcaggtatagacaagaaccggtcttcaatggtatctgttcccatctggcactttgtgcactggcaatcaaagaagtagcgttctttcaattcgttgcgacggatatcgtatggtgtcgtggtgtcgatgtaggagatgaatatttgctcgccctttttgataggacgcatagctttgacgtatagttcttcaccatcaaatcccacagtggagttataggcgcagctgtggttgatcaggccggcatatggatgcatgtagaggccaatgcggtcatacatggaggtggtaaggttgaaggagttgagatcaagctatgatatagttagacaaaagtccgcgatgaaaggtgtaaggctaaaaccaattaccttggcagcataagaagcgatagttccttcatccacatccgtccctgagtaattcttgacagctcttgccgtcaggttaatcctatcaagctggccttggctctctgatatctcgttgatatgagtctccaagccatcaaagaccttgaactcttcagcgtcgtatttgctacgcgcagtgcgcagtactacacgtaggagagcacgggcattgttgggaagaaccataggcttgacttttttgaagatggggcattcaagagaatgcgcgaacttccagtccttagattgacatacctaaatcaaatattagaatatcaaaccagtaatctttggtaggacaagaaatatgagacagcaaacagtatatcgtatatcccattagcaactcacccgatcacaatacttcacgacacggcatcccgtgcaagcctttaactcatttccagtttctacctgtctctttccgaagcaaccagcacaagtgtcctctaaacgtggggaatcaagaaccgccacaaatggtgttttgatgtgcaaaacatcttcaccggggttgatgtcggctgtcgcaaacagaccgttacccaggccattgggggcaggctgtgggaccgttctggtcgttaccgaaggtagtgcaattcttgatgccattttaggtgatctgaatacaggaataagaatgtttgaagatataacaattagagtggatagtcgtccacacgggcagggcggtgaatattcgccattgtatttgaatatcttggcattaatagtggaagattaatagaatctccaacataccacaataaagagcagtcacatggaagacattgagatttcccttgtggttttactgcttgccaattcagcttaacagaagctagaaaccagctctatctttatatgcaaagtcgcgacatggtatgaatcgggcaaagaaatactcctacaaatccttttaagcagaaagccataccaatcaagatgaatatttggagccaaaaagaatcagattcgaggcgctatttaggtaaattactaggtggacatatagcatagctcattcaaagtgtataaacccagagactcaagtcccaataaattaaacatcaggcatgaaaagaacatgaaaagaaccaaactcaagacctagagcatagccgcaaaagcagcagcagcagcaacagcgcccaacggtgcagcagtgatcagaggcttggcagcagccgcagcaccagcagtagaagcagtaggagtaatcttcaccggtgtagtcgaacccgtcgcattagccttgaaagcgtagataccatcggtgacagtaagagggtgataaataaccgaatacgacgggatggattgtgtgctcgaggtggaatcggaaatggtgtgatcaccctcggaggcagtgtactcatacttccacgtgcaacgagcagattcagaaaggcgggtgaaactgcatgactcgactgcggtcgcttgagcagtcgcacccttggtcacgacagtcacttccagggagacgctgtaagtcgcatcgccctggatcagggttgcggggcggttcagtgcgcacttggatgcgcctgccatgcaggcgatctcataggtcgtggcgtacttgtcgatgccagcaactcgggctgcgatgctggagtaggcgccgatattggcgccgtagggattgtcaattccgaaatagctgacggttgttgtgctgggctcatcagcggtagtcagagccgctaggagagaaacgaggaaccaagatgagcgcatatttgcaggattcgaagatgagggatttcaaggttgtgagaatagagagaacagggttgggcagaagaaaaggagttaggaagcaggggaagtttttcacagtcactgttatgttagctcatgactagcgtgcccgatgggcctaaaaagagttacagagttccgcaagccaagcatcgctcgtatacaagcgctatacttggcacttggcactgacaagtaatttcgtttaagggctgtggtaaggaaccaaagacatatcggtacagatcttgagggcctatggttgtgacctacaagcatcagtcaagacctaggctatcttgaaggtgaagaagttcaaggtggcatttgaaggcaacaaaatgatggctcaaggacaatagaatagaagtcattagtcgcaaaggtcggcaaagattgctgtcacgaggacccgtggaccctatcaagccctttcaagtgagacatcaacgtccttctgattggcgcccacaggaggctcaagcccctcctagcctaaactaatattgtggctgagcccctggaaatgaataatgataggaccctgaatatagctatgcacaagtatggagtacggaaaatatctcaaaggtcaaattcgtataggatcggccgtagagcagagagtatagacgaggaacaattcgaagattcataaggaaaagacaatattccaatccgagtacaataattaaaaaaggccaaaaggacaatgcgcgccatctatcaacaagattgccctacccactacaccgtacaggaagtttgaatcctgtcctatattggaaaatcatgacgggaggacctggggaggccatatgggatatcgaggggaaaagagaggttgacttcctctctcttaatctcgacatggtggggttttttttctcttcttctgtcactgtgtgcaaaaaagagagatttacagtgccttgccgccgacaaagttggcccaggtgcggacctcggagggaattccttcggcgcggggcagcttctggctcatgcactgagcaaagagctgggcagtctgtagaggatcagttagcaagttgaataattatggagtatcagctctttgaacataccttaggctccatgaatagaggcacgctgaaatcgacagcgttgcgacgcatgacatagtcttcatcaagctgggtcttgccacgggtcttggcaaggttgaagcagccacggatgtcgtacttctggaacacttcacggagagcacgcttgtccttcttggggaactcaatcagcttcacggagacgtcattctgggcggtggactcgatgtgagccttgacttcggggttgacggcatagaacttgtagccaagagggtgcaggtagtcgacaatcctggtcaggtagggctggttggtatcaccgccgagcaagataccctcgccgggctcgggcacgcggaagttcatggtggactggagggaagaccagtatgcctcgatcagatccttaccgaagcaagcaatttcaccggtggaggacatctcgacgcccaggaaggggtcggcaccagccagacgggtccaggagaactggggaaccttggtagcgaggtagtcacgcttcaccttcatgaggtcgacgggctcggggacatcacggccgacgagagccttggtggcgacgtcgatgaagttggtacctaggaccttgctgacgaaggggaaggagcgagaggcgcgcaggttgcactcaataaccttgagcgcgggctcgccaccctcctggtcggccttgatgatctgcatgttgaaggggccagtaatgttccaggccttagcgaccttttcggcgatctccttgacgcgggccatgatgggctcctcaagggtagcggggggcaggacgagggtggcatcaccggagtgaacaccagcgggctcgacgtgctcggaaacagcgtggacaagcagcttaccgttggaagcgacggcatccacatcaatctcctcggcaccctcgatgaacttggtgatgacaacggggtgatcaggggaaacggcagcggcgttcaagagcttctccttgagctcatcgacaccgtagatgacgttcatggcggcaccggacagaacgtaactgggacgaaccaagacggggtaacccacagtgtcggcgaagacctcagcatcagcgacagaggtcagttccttccaggcgggctggtcaacaccaatgctatcgaggatagaggagaacttgtgacggtcctcggccttgtcaatgtccagagggttggtacccataatagtagcaccaccgctctcttgcaggcggagggcaatgttctgaggaagctgaccaccgacagagacaacgacaccgctagacgcctcgagctcgtagatatccatgacacgctcgtagctgagctcctcgaagtacagcttatcagcggtatcgaagtcagtggagtaggtctcggggttgtagttaatcataacggtcttcttgcccatctcacggagggagagagtagcgttaacagcgcaccaatcgaactcaacggagctaccaatacggtacacaccgctgccaagaatgataattccgtggtcatcgaaggtaacatcgtgggaggaagcgttataggtagtgtagaggtagttggtatcggcggggaactcggcagcaagggtatcgatcttcttaacccaaggagtgatgccgaaggacttacggcgagcacggacatcatcctcggtagatccaaccaggagagagatctgcttatcggagaaaccgagcttcttagccttcatcaggatctcctgcttgaggccgaagaggctgccgatttccttgagttcattgttgcaatccacaatgttctggatcttgtacaagaaccacttgtcgatctttgtcagctcgtgaaccttgtcaacggagtagttctcgtggagcatagcctggccaacagccaaccagcggcgatcagtggggttgcggagagtctcgtcaaggtcatcaaacttatcaccctggagaccaaggtattgagggtcaacctgacggatggccttctgcagggactcctcccaggtacggccaatagccataacctcgccgaccgacttcatggcggagccaatgtcgcggttaacgtgctggaacttgctcaaatcccagcggggaatcttggtgacaacatagtccagactgggctcgaagttggcagtggtggtcttagtaacggcattagggagctcgggaagagtatgtcccaacccgatcttagccgcggtataagcaagcgggtaaccggtggccttggaagccagggcggaggaacgcgaaagacgagcgttaacctcaatgacacggtagtcgagtccatcgggctgcagagcgtattggacattgcactcgccaacgacacccaagtgacggacaatcttaatagcagcagtgcggagcatgtggtactcctcatcagacagagtctgactaggggcaacaacgatactgtcaccggtatgaattccgagagggtcgaagttctccatgttgcaaacggtaatacagttgttggcagcgtcacggacaacctcgtactcaacctccttccagcccttaagggacttctcgaccagaatctggggagacagagacagagagcgcgaggacaagtcacggagctcatcggggttgttggcgaagccagaacccaggccaccgagggcgtaagcagaccgaacaatgatggggtatccaacctgctcggcagccttgagagcgtcctcgacagtctcgacagcggtcgattcagcaatgggaatatcgatctcgttcaaggcctgggcgaagaggtcacggtcctcactagtctccagggtcttgatgggggtgccgagaaccttgacaccgtagcgttcaaaggtgcccatgcggttcatctgcacacccaggttcagggcagtctgaccaccgaaggtgaggagaataccatcggggcgctcgcgctcaatgacgtgggtaacatattcgggggtgacggggaggtagtagacttcgtccgcaagcttgtggtcggtctggatggtcgcaatgttggggttgatcaggatcgagtggacgccagcttccttgagagccttgagtgcttgagagcctattttatcgcacagtcaaaagattagttacagttctcatttagattgatttttagcgatcatttttcaagctctctgtattccccacagaaaagcttctcgtgcagacgcaacccccatggggactgacagggcgatgtgatcgaaaatttcatctccaagtgattgcaacttaccagaataatcgaattctccagcttgtccaatgctcaaaccaccactgccaatgacgaggaccttcttgacatcgacgaggttgctacctgccgacacagcaccgctagcgagataagactcagcagccgggggcctctcagcagccaggcggttcaatgtgctagagaaagaacggagctgctgagaccgagccgtggggatcttctgcaggcgtagtgtggaggccgttgaacggacggactgagatgagaatgcgcgcagagaaagtgctggtcgggtttcagcaatgcagcgctggcgcagcagagcggccgcctgcccacatcgagcagcgagagccattgcgcaccgaaggtaatgtttcaattgctgagggatgtgttgaggatgagtctacactttgctgggattcttttttttccgcctcgaagtcgctaattggctcgttccgtccaccgtatacggctccacttttgaagaccaacgagggaaagccgggggatattggggattatataccagcgtagatcgggaggatctaataatgaatcttgataatttagtatgaagaggttgggttttatatttgcttcattattcccctttttttgtttattataatctctttttttttcagttggtggcgatgagtcaaacctggatgtggagacgatctctcggctatctttcttatactaaattgtatgccccggtgtatactaattaaagccttggtaattgtctattgccatagctacctttcatgtatatagaagatgtagagtgtataggcaattggagcttccaagaacatcatatccctccagacaatcttggaaatgccgatgccggacctcaaccctatctcttatctctcaacatcgagctacgatctcccaccacaaccctaattgacagtagattggctggaaaaaggcaaccttacatcggctgtgactggcgacacgatggcgctggtgctaatgttgtccgttctgacattgccgtcattaaaaacgaaaacttagatgcctctatggccattgcatttgcatgggataagcataccgaagttgatagcggtggatcctaaagattcactggaaaatgcatagcaaatataggaaggaagctgtcatttactggtataccattgttcagactagtggatatggcgagaagtacgagcctatcgatggttgctagagaatgggagtatatattgacaatacttgggtgccaaagataggctttgtacatatacagctctaactaataaccgagcatcatggataaagacgcgagagacatgaatgctatgagagatctatagatgttgttatactcatctttctgggtaaacccccaaccttggcgactgcttagccaatttacctcggatattactcgatagctttgctgcaattggtatactaggctgtatgtgcatttctagcagagatattgtagtgatatgtcctactcgtggagaatagaaagaatatacaaatgagatactctatatatattcagctcttactccctcatataccatccaatcgtgatactaaaaacaacccacagaattcacaggcgaacagaacaagctctataatagcaactactaccaagtaaactatcgcgctagaatggaattgagtatgtatgtatgagttcgattccatgatcctcttactccgtcggacaaaccccaacaacctcgagagctacaccaaaagaccaacgcacatagctggattacgctgtaatgagccgatagagtatatggtatattgtacatttaaaaaagctattatactacatacatcactgtacaattattccgcaacccctactctcccattcagacgtgaccaaggaccactcggttgtttctcaatccgagacccaccacccctcgacatcccctttggagagcgagtttcggaggcccagaaatccgacccatctcggttctgccgaccctccagcatgacctcatcgaggtcctgattgagcgttttacatacttcagccaaggtttgtcgggcgtcctgcgcaacctcattacctaatgcgatcttttgctgaacaaactcctttccgttggcagctgcagcattagaggcaaatgcccatgcctcagcaagaccaacgacctcatccggggtctgctcggaggtctgtgtctggattcgcgagccaagagtaggagtatgcttaaagcgcggctggcgggcgagaatggggtattcggggagtaggtgggattcatcgctcagacgattgagggcgcgaagggtcgtggatttttcctttgacagtaacccggatagataggatctctggagagccagcgacttctgactcttatatagcgggaccagggtttcgtttgtgtataacagaacgtcgattgggttaggaggtggcatttctgctgtggaaagttcgattttgttggttgttcgtgacggaggcttctgggtcaaattgactggctgacaagctctggacgcggcgtcgaggagatctcgccgggcttgtagatatgcggcatattgctctgcaatctgtatcttgcgattctctagccctcgctgggcctcctcgatgtcctccggaggaagctcttggagcagactctcatctggatccccttgaccaaccagccgttcctccacccattgtactagctcatcccgggtcctttgtaatgcctgtgctttggtatctgcagtctcggcttggggatcatgctgtgccttggctttctcaaataattgcttctggcggtccaattgagccctcgcgcagacaactgctctctcgaggctatgcactagttcatccaagcccgtttcagtgtcattgcgcccgacctccgcatctgcctccggcaacagaatttgctcgctattattgccaacgtcctccacgctccccgaatcgcgggttctaatctcttcaagataattctgaaacacctgcagcttggtatggcggcgtcgatcgcgtaggagagcaaggtattcgcgaagttcggtgccgggctcttgcatatcagcatcgtcagaaggggctttcggggccgtccgctggcgccttaaagaggcgacatcctcagacgccaaggcgaactctttgcgggcggcaacattggctgccaatgccttgagataatcctttctcagcccaggaagatcggcagggatgcgtttgacattggtaacggcatcggtcgacgcgcacagggagaggtgggattgagcaagatcgcttgactgatcgttgaattcgataaatgagcgaagataagacgtcagtgcctggcggatatgaagggtttcctggcgcgatctgacgtaaggagcaagtggtttcaggatgtgtggaatgtgggtagcgtcaggagcgttggatcgggccatggtttcattaagtgagggtttgaagcgacaagcttggatatctggagagtcaaccttagaagccgagaccctgacaggtcttggaagacttcactgccacaatacacaatgcacaatccacagcgatctcgtgagatcgaagttgtttacctctttcacggcgggctgttggcaggcttatgtaacatgcagatcgtctcccgggccagtgccgcagtggagtttattgttttgcaagtccagcatctataatatgatgggtatgacgttcaggaaccggcaggagcttaaagacgccgatcaacaatgtattggcccttgggtcgattattgctcgatttattggacagctctaattgagacatccaatatgccgcaaagtgggcctgagcaccatgtctgttctgtacaatccccgttcatttggatgtttgccagtagattaacatatatattcatggaatgtgccatgagacacctatccgacagtcattgtagcgtatcgatctttttcgcaagacaaatagtgtgaatgttcatccaatatgtctggaatgccatgttatctagagctacggagtacaacgtaggtacatgtacatgtacgtacatacatccagtagatgcagattacgggcacggcccaatcaaagcgacaaaggataagacatctcacggcaagagagaagcccaacttttcggatttctctcttgcctttctcgattcctttccctgaaggagcaggcctttgaccccctccataactggtatgtttcaagaatatccctggaattgcatcaaggggtgttttgatctaattctggactaggatctgactgttcctgattattgtctcaaggctgaaacatttatacttcagtccttgcgacttacatgctgactgcgagtgcgggaaagcaaacttaacgtttagcaatatcatcagaacatacctgacagccatggctcctgacttgagcgctgcttccgactctactatggcacaacctcctgcagcaacgacggcacccgctatggcatcgcaggctccaacatcccgacaaccagtacacagttcccatacttctgtaacacttccgcccccaggaagcccaccgcttggaacgggggattatggcatcacaaggaccgctcagggtaagtcgccagtggcaggcgtcactttgatgagctccccgactaacagaacaagggccactgcgtcatcctcagccgctgacgccttcggatctccatctagtgcttgagaaagagcaagaagcgattgtaagtgggatcccagagcgccaaaagtatatctacccctcaactgctgacgcgtcaaaactctccgcaggtgaatcgattgactcgagagctatctattcttcgccagcagacagcatctgttgcatcgacgacatcctccacgtcaacttttaacgaggcagatggtgcgcgggcatcacccgccctcagcagttcaaccccatctcactccgcgcgacgaaaccgatccaattcgagtctcagttcacatacttcagcaagccagggccagcagtctgcaagtgtcactggaattgctccctcgcgggatattcaatatcgcccggaccattctcgaacggttcgcagtcgcgagccatccctcacctctcgccgaccctctatggggtcactatcctcattccctcacaacagcaacatatacccacaacggagctcggtctcacagacccagcaaggccattcacccggaaactccctgtcgcggtttgaggaggctgcacatcacaagttggaagtggaatacatgaagcgggagaatgagcagctgaggaggcgggtccgagatctggagcagactttgaagaggcaaaaggaagattcggccagtgaggcttctgccacaccatctgagagaatcattgaggcctgattttcaatttccactccaacccatatcattctttcgcattgcgcaacatttttatcttaggtttgcaggcaaacacattcatcgaaattataaaactgacatgtgaaaagcaatttcaggcagccccattgaagaccatgtagtccaatgaaacaaacactacggagtagaagaaaccagaacgaaattaactacgtgaggcggtgcaacagccccgccatacgtcaccacgtcaccttgtggcgcagtggcccccttagataaatagtcgcatcccaccagggaatgatgagatgtttagattccttcgcaagattcttcctttatcctctacctaacatcatggctaattccactgtccacgtttctggcatctcgtcaacaacctccgagaaggaggttcgcgacttcttcagcttctggtacattattacaatgattttttttatttgaccaagtgctaacataaaacagcggaaagattgtcaccctctccatcaccccagtctctggggaggccgatgctccgaagtccgccactgtgacgttcgaaaaggaggcgtaagctaccccgcacccagtttcagcccgcaatcagcccacatcaacacaaactaacgcaatttctaaaacagcgcagccaagactgccctcctcctagaccagacccaactgggcacttctgccgttcacgttgaagcaacccacaacatcgaagaaataggcggatcccatgtcaccgacgcggagaccgaggcccgggaagaggagcacatcgcgcaagaagacaagccccgatcgcgcatcgtcgcagagtacctggcgcacgggtacgtagtgagcgacaatgccatcatgaaggcgatcgcgctggacaagaagcacggtgtctcgcaccgcttcacgaccgcgctcaccaacttcgataagaagtacaatgccaccgagcgcgccaagggcatcgataacgactatcagatctccactaaggcagccaatggctggcgcggcctgagctcgtacttcgagaaggccctggagtccccctctggccagaagctgcgcgacttttatgttcagaccgataagcaggtgcgcgatatccacgccgaggcccgtcgtctggcggatttgaagcagggtaagactgaggctgctgccgctgcccctggccctgctgctgttgctgagcctgctactgagcccgctgctcagcccgctgctgttccttctcagcccgaggctgctgctgcgcctgttgagaagtcctaagggattattggaatgagatcttaaattaatgtggagatgaagatttgcgctgggcgtgtttcctttgtgtctattactttatcctttccattattacgatgtcatgtcatgccgtgtcaatagtttatttttctttctgataaccgattttagggctctttctatacacgtgagcctttgataactatggtctccaataagcaaagcaaattaacatgaagattgatttcaagtcagaggtttaatgtattgttttactaagtacattactcaaatgaagagattatttgagcttattcttcatgatgtcattatccgaaattcaaaaacaggaccttccaaatccacaagagataccccatctcaatggtgtttatcgttggcatatttcgccgcctcgatcttctctagccggggttcggggttgctcgtcatcacagtgtccctatattcctccgacgataacacgggttctggttgcttgccgacattggtcttgccggagccggggatatcctgctgctgggcgccggattggcgctccggagaaggggattgacggccgggtaagggagcagacattattgtggatattgtagaagttttttaatgtgctgaagagagggataagtgtgagtttcttaactgaagaagggaaatggaactcatgagatatggcgatcttgacagtactgaccttcaagtgatgtaggcttgtaatggatgaagatgttgagtatgtgtgtttgaacagtagagtctaaggaatagtgcttcttttattttatcctggaaaccaactgacgttaccaactaaaccggtcattgattgggggtcatcatgatgacgttgagtagcacttggaacaaggcctacaacatacaactaccacaagacgatcctacaacttactaacggtatatacttaagtatccttattgtagttatagtacggagtagtctgtgccgccatagatccttactatgggctacttctgacttctttgctctagaaccaaaaccatcacttctttaagcgttgtttcatctcagtaaaacttgtttgtgccatgaatatattcacgttgacttcaagagcaagccgtgcgcgacgacgtcggaatccgacaatgcctcgaggatacaggtcccaccgacaatatggataatgctcctgagccatgacgtcacttgtcacgatctttgttttgacctcacctttttccttccatactcctacacgagtaatcttagaatattcttataacaatctggattcagttccgagtccactaggtggctggtttcgacggcactacaggttccagagctggaatccatcattcgtagcatggctgatgtactatatcatgaggaaacaagggtgtcttcaggggaatctgtgcatcgaagaggattagaaaggggaagagggggaataccctcgagcagaatgtccacaggtaggacttttaagagtacatcagcgagagcatcacatgaaaaagacgtgaggaaagaaaacacggagatacagagcagacgggacatgatctaaagaagcgggaaagacatgaaatgggcatatggtctcgtgaggaaaatgtggaaggaggaaagaaaaatcgtccgaggcattggaaattcgaatccttttttgtttttctcaatccatctcggttatagtctcttagttgccgttggcctgcatgcccgctgcggcagcggcttctgcgttggcggcggcgaccatggccttggcatcggcttcgtggaagacgccttgtatgacctgctgctcttcgtgaccaagaaccttggtcagactctcgtagagctggggctgttcttgttggaggcctgaaatcgaggttagctggtgataggatactctcttatatgtcacttactcaacaggacatgcttgaacatgccatatggctccaatttgtccagaggggtctctagaaggctttcctcgtccatgtcatcatcgtcatcatcggtgtaggagccgaatttttgagcttcctggttgaggaagtcgagataagcagcactctcgtcgtgaacatcaccctcttcaagagctgcttcaacctcgttttcgtcccactcaacatctccatcccagtcattgtcttcgtcgtcttcatcatcctcgtcatcgagggtgaagtcggactccttggtagcatcctcgcgttctggataaattcttagccttggggaaacacgacgggatacttggagaaacatacgcttgagagcagcaggcagggtctggaagagtcttgtcacaccctgcaacagtcttggccatccctgctggacactgaccggaacatcggcagccttcaaagtaagcagtgagctgattgcggcaattgacagctttttgtcgtgtacacgtctgaagttgtcaatgttagcgaaccaagtgctgaagaatttgtttgtccagcccttagcctccataacctgcagactaagagctgggttgtagtaaatggcgttaatgaccatctccatcaagtggatgcggtacgacttggtgcttgcctcgccagcatcgataacccgcatagccatctcaatgaacatggggatgtactggtcaatgtgaccccgaaggttgagcatcagggtctcagcaagcttgcatccgcagatgcggtcaacgccaccaacctgttcgtcagaaaagatgtcctgcaccataccaaccatagcgtccaagtaagctgggttctgaactagcatatcggagccataagcgacatagttgtcaagggcgggaagcatgtctgtacgcagaaaagttaataaaacatcaaaaccgcgtgaatttatgtgaacttcaccttcgagatacagctcagcaccagccttgaaggtcttgtggatcagctcgaaagcttgccacatagatggggaaatggtcttggatgcgaatgtgcagctgtcaatgatctcgaaaatttcgttatagagatctaaaatagccagttagagccgcgcatacgcttgatatattgacaaacttaccataaagcttgttctctagggtgatgctgatgacgggcatcaagatagtctcgaggtgcaaaagcacgtcaggggtgctctcgagtgtgagaatgagggtgccgatggtctgtaacacacccagagcggttatgctcttgtcatccaagaaatcgccgtagccatcttcgtcaccacccttggaggcattgcgttccaagagctcaccaacaatacgcatgtatgtatcgcggagctgctcgctcaacgctacagcgaagggagtaagctcggcagagaatacctcaacaaagtcctccatgacgttggctagagcatccacgtcgacctcattggccaacttgagaagctgctgcataatctggggaatgttctgctgcatcgaggtacggatgacatcgtgacggataaggggctgcagagcaagggcagcctcaactcgcacgggaagttcggaatcggtcatggactccaggatgtttcgatagataaccatgaggttgttagggtccttgaagtcgagctgctcgaacttctccagggtgtcgcaagcacgagcacggaggaagccatggggactgcggaattcggggaaaacatgacggacgaagaagtattcgacctggtcagcaatcgggctcttcttgcccaggataacggaagcaagcgagccaatcattctcaaagcgccctccttctccctgggctgcttctgatcatccggcgcagactcatatttgctaacaacactgtttacgaatgtaagaattgagaaggtctgcttcttgcggttcttggtaagggaaaccaagaagtttgtggcggcaacatcaggagcggaaacctcctcatagaagttcaacttgcggtggagatactcagatgggtcatcttcgaaaagctcaatatcctcgtcggattggcacaagatagggaaaacgaagtgggcaatcaggttatccatgtgcggcttcaagtggtcccacatggcctttggcttgacacactcctccataaagaccaaagtatacgaaagtgcggagttgctgagccattgtgtcttggacacccacttgtcaatctccgtcaggtatcccttgagaatttcgggggcgaaagtgctgataaaggtcttggcatacggtgtgtagtcgggggtagaggatttcgtgatcgtggtagggttgccatatctgatgaataggcggttcaagttggcatatgaccacttcttgcacttccaccagtggttcatctccctctcctccttcgagtctgccattgagctggcagggggtgtcttcgagacaatgcgcaagaatagtgtacaccagtccacagtcgcttggtgggtctgtaggcatggagaaagctcgaactaaaatcgcaatcagtcagtataaataacctagccccgcgcagactagaatcagggtaactgacataaattgcgtgcttgaaagccttcactacaatacgaagcatctccgcagcctccagactttcctcatcaacaagcttcgatccgatgctgaggagctgtgggaatgacagctccacgatcttatcaaactcctctctcttctcgccagccttaaacctgtaaacccggcagactgccaaaagacactgcagacccgcatagaccgtactcgcatcattggtgctgagaagctgcagagtaagatccaaaaaacccggccactgctcggggaagtcgttttggagaatcttctgcaggaggggaaccagttgattgcggacgttgggaggagtcgaagccagagcagggataagtctctccctgaaactaggcttctcgatttcgggaatcggcgtacgctgcgggctatcttcgacgggggcccacccacgggtaatacggttcttcaggtaaacaccagctataagagtgagcgggtcagcaagggacagcatttcctttgccaactaatatagacaccaaacttaccagagagctggactgcattgttctgctcgccctgcaagatatccaagagtccattgataaatccgggttgtgtctcggcctagatatatcaaccacgtgtgagtctgacgtccggtgccccgccagtcgatccagcacgtacatatttcaaatcaagctccgcttgccggcgtatatccgcattcgcgtctagagtagactgaacacgatctcggagggctgtgacatccatcgcgcaacaatcccccaacaccagaaagtcaaaaaatctccaaatacactgagaaccccggggggagacgcggaccggcgctaatggaagacgggcgaggaaaaaaagtcaagaattgtaaggacgtgagtgtccttgaagagatcggtctggatcttgaagacaaggtgagagaagatgttgttcttcaagaggagggggattttttttcgattttcccgactctcgggaggcggtcgccccgcagctaatcagaggccgcacacacggattttgtaagaactatgaactacctagatgtgggctattgtgagcttggataaacactgagggttgatttattgctctctctaaaacattacaggggtttattattgatttatatagagtttgatggtttcgtattcattccttcatcttgattacatacattgcggaatccatcagtggaggagaggttcatgactacccaatagggccgcaggcatataccccctaaggattgggtatcttcacatgtaaagagaggccgcgaagatgacatcgcgcttgatcaactcctgagcttgctgcatcttagtgtaaagtgtcgggtctccgaccagtttggccgcattcttcacttcgcgacaagtctcgtccagtcgggtgatcacccgaacaatagtaccctccattacgtccgtgaggtcagtgatgcgattgaaagacattcccttggcccactcataaacaacttcagcgagaccgaagcgtggcttactagcgaagtcgttggaatcttcactagattgaatgacctggtgcagaatctggaaatcattcactttctcggcgatacgaatgatctccttctggcccttctccagacgtggagtgagggtgggagtgctgtctgtcttttcctggaacacaaatgcagagaggagtgcaacaatctcctccggctcgtattcagcaagaacgttctcgagaaccaattcggttaagaccaactcgtcggcggagtgaatttcgcatgccaccttgcccttcagttgtacacgagattgttcgtcaacaaagccgagctccctcagtacgtgaatgcgctgctcataatccggaagtagttggaggttttggtcggacatcagctgcttcaactccgagatgttttctttaacttgccactcgtcgtgttgcatttcgaactatatggcattagtatggggttcagatcaataggaatgagatactcacatggtttacgaaatcaggacattgtagacagtggcatgactgggcaatctctgcctgaacttgtcgtttgtcgaggatatcgcggatttccatttctttgatacgttgccagtcgatttcgtcccaggccgtatcgatccaagagttggtgaactggcatagttctgtttctgcccacttcatagactctatttctgaattagtattttcgtaaccgtatgttcaagaagacagtatgaacttacccttcttaatattcagataccacattggttttgtgattttaacctgggtgtttgtcacgcactcgagatcggataacggaatcttgcacactcgaaggctcatgtcatctacacgattggggagtggttggaagtagggtctgaataaaggtaagaatggaagaatgtcagtggggtgccgcttgctactcaaggttccaatctcaagtacttgaatacagggcacggccccaatgactccgggagaaactccgtcgcgcgtaataacaccagcagtacggagtccatcctgtgtttcacgttagctttaaaccaaatatgtattatatcgcaacagaacacgagcactcaccttgcggtacacaaccaacctcttcattgtgaaaagacgtttgccgacaggcgatgatagcagttcggtgtggaactcagctgtgagctttcgatactccatggcggcgttatggcaggtcaatagatccaaatcacagatctcacatggtgcccgtttgattttcgcaagactggcctcagatacctggacttgcttctcgtgttctggtaagagggcttgtgttgcgttttcactgaaactccgcttgatcatttcctcgatcttcagggcttccacacgcaacagatttagtatcatgttgtatgtgagtcggaattgagatctgagctttgtcggatctccaagaatcatctgtttcaacgaggcagcagatggggcctcgtcttttccactgtttgtcacgatgacatatcccaccgtgtcaagacctctacgaccagcacgtccagccatttgcgtatattcgccgggcaggagatcacggaagcttttgccgtcgtgcttgcggaacccggagaataccacagttcgggtgggaagattcaagcccatcgcgaaggtctctgtggcgaacagaaccttgaccagagacctagcgaagagaatctcaacaacttccttcatgatgggcaggagaccaccatggtgtacagcaatgcctctgcttaatagctcgcgcaggcgaaggatttgcggcagcgtacggtcctcgggctttaatcgagtgagtgacttttcaatgaacatgtgtgtcaaactcttctcgttggcattgctgaagtcttggtttgaaagtgaatctgcgttctcctcgcatcgtttcttagagaaaacgaagacacatcccggcagcaagtcttctttgcgaagatgcgaaacaagatgcacccaagtgtttttgtcctgggccgcacttgtacgaccaccaccacggcctgtacgagcgatgttacccgtgcctcggttggagtactgtccaccgctctgtcctcgacctcgttgcgggcctccacgctgtgggccgccgcggccgcctctgttattcgctggctgaccgcggcctcggccctggggagctggtgctctagcttgcgccgactgcgcctgagcttcagcctccttcttagctttggccttatctttgccggacaggatatcatccgcttccttccagccactctcaaggaatcttttgttggagtcgacgatcttgtgcttgctcttcccggcccagagatagtgctccagcgggacaggtcgcttatgggttgaaattacataaatgtccttcttctttgtacggcccacccaggatgcaaactcccgagtattgggaacagtggcagagagaagaatcaacgtgacatgctcgggaagcataatgatgacttcttcccataccactcctcgttcgaggtcgttcacataatgcacctcatcaaaaatgacgaattcaacgtcccggatgagatcagcacctcggtacagcatacttcgcaagatctcagtggtcataatgagacagctcgcttccgggttgatttgaacatcaccagtcagaatgccgacatcgtcgaattcggttctgaaatcacggtatttctggttgctcagcgctttgatgggagaagtatagattgctttggtcatatgcttagcagccaaggcgattgcatattcagccacaactgtcttgcctgccgaggtatgggctgcaacaaacaccgaatcgccattttcgaggtggtaaacagcctccttttggaaagtgtcgagctcgaatggccactctctggccatatctggaaccaactcattgaagttgggaatatccttgttgacatcgacaacgtgggcccattctctacctttttgcttgacacctgcaagcaactggctacgcggctccaacgccgggaactcaactggtagcaaagcgtcaatatcttcttcttcttcatcgtcgctgatatcatcaagctcgacctctgctcctaattcgacatccgcagattcctcgggttgatccaccttcaggtcactttcctcttggagaagggcggtttcgacttcttgggcaccttcggtggcggctttagattttgcttcatcgaaatcgataccgttatcgaagccagggggtgttgtcagaagacctccctcggtgccaaagttgatgatgcgatcgagtccagattgtttccccttggtcgattgttctgtgacctgagcatcggcctccattgctgccaaggcctcgatagcgtccaagcctccgggtgcgaacggaaagaaacctgcggcacctctgacaaagtcggcacgaccagcaggtcggcggagaagcgaggtggaattcttggccgttgcgcttgcagcaggaaccgtgacttcttgatatccagtgacgcgtccttccagtccctctcgtgtaaatcgcgttactgtccgtgtttgtgttggcgcgagttcgaaaaggtctgcatagtctgtcgaaacgtcccatcgtctgccaaagccgttaaaagctgccccgcgaatgaaaccaagatacttacttacttttggagagagttcaaccatttagtgctgaattggtccgatggggtcagaaactcattttcgagctctgttagcaactcttgcgcactctgaggggcctgcttccgagcttggaagttctcgatcttgccatcctcttcgtctgcgagacgagcatcgaaggtcgcggggtcgaagtgtctgccttctatgtctagctccttcattgtggaatcgagcgagtcggccatggtgtaggcaatgtatcggagagataagtaaaattatgtcgatgtttgactcggcagtagccgaaccccacaccgatatctgtatggatttcaagttctggcgcaaacacgggagtaattgtattccgacgtaaaaagaacaaatttaacgaatgaaattgattatgcgggtgagtgcgatagagtatttcgaagtgctttcaggcaacattatgtagcaataggctacttggggtaaacctcgctgagagaaactcaaggcggtgtagtccggcagtatccatgacgtcgatgcccaggtgtggggttatcgcatttagggctatgtgtactagtaatacttggccgcccatgcgggctctgcctttaataatccgatctatttagccgaagacgatatcaagcgcgttacatgtaagatcatacgatgtagcaatacctatactcgtgtcaggtttcgttttgggccgcaggccgctgtaacttcattgatcaagacaaccagcagccttcagccaggcaaagaaaagactgcagggtgaagacaaaaagaaatttacttatcatactgattccattgttatagctaactatttagtcctaaatccacctctcttatttttcgactcgttctgaggaagcacgatttggaagaatttcttgacatttttaacagcatacagctatattttcgagaatggcgatcaacaatcattttgatgagcgagttctgggttggcatccggatatagccggataaaatggccttttcttcaatttggacaagattgtattggcagaaaatatcaatatatatttaactttttgtacttcaatcagtcatacgaagaattgtgaatgaaagatgcaacaaataaaagggatagggatgaaatgatgtacgcccctaagcgccagaagggtatgtagtgtgagaacgattccatatgagaaaaggattagcacaacaagaatgagtcctgacaaggaatggcaatgaatcccttttttaaagtgaagactgtagatcatcctggtttagcagcaggtccgtcgttcgaagagattccggacctttgtgaaatctgcatgatcatgatcagaagaaaaaaacaagaaagaaaatcacagaaaagtaaatgagactcgatgatgttagataaataattcccagtaacgccaggcatggaaatttaacggcaagagaatttaggaaatgttttccgatcgtgaatgttcagtgagaattcgaaaattccctccagtgttgcgatgtacctgaaaaaaaaaattagtttaagcccgcaaggttgctgcattgcacactcacaatgtgcgtccatcagcgccccagccaactccagcagtagaatctggctcctcggcgccgcacccatgcattgaatttcgatcagggaggtcattgataatgtttctgatccagcggggagaatgtgtctgttcaaatccgagaagctgttggcgatgccgttgttccctctcaaaggagcggttgtgtacctcattagcaatctggcgctggcgccgaagtcgctcagcagcgacattggcacgaatctcatatgtggtgagacgtggattatcatatcttctttctgctccggtttgtggtcgttcgatgcgccggggaatggagcttgatcgctggggtcgatggttcaaaccattcgtatctagacttggattagaagatccagtcgcttcagctggaatgctagtttcgttgttggtcgtttcaggattggcagtaccccgatagatcatttctgatctgaggggtgtaagctctgaatgcgaggtggaataactcagggtgatgtctgattggcgatcatggtgagaggacgatgcttccgaaggtcgacgacttccttgagataccaccaccgagctctggcgtcttggattggatacagtgcggcccaaatggctatctcgggagacatcagaagaatcatagcgatgcaagggcgaagtaggacgatgggtgcgagtggcaccatccgtggaaccatgattttgcggccgagccactagttgaggtggaaggcctgccctagccgggcgctctaatcgttcagtaagtccttcttccagccgtgatgtccagcgtgccgtgttcaaaaactccataatcagcctttctctctcgctaagatcttgaatcaaagactcccgcagagacgaacgctccgtttgctctccattccgttcaatcgaaaaatcttcgttttcgagtctcactcgtggtggagtctccagaatatcgtctcctagcgggtgtcgttcgaggttctctgttgaaaagtccgtgtacacttcctgcaattgtggatcattagaatctaaatggaggatttgtctgcgcataaaatgttggcgaacgtcggccacaccagctctaccgtgaccctccagccatacaagaaggtcccatggttcgggcgaaaaggccatgcaacgaacggcaccgccctcggtgcatgatcttgatgccgggaattgacaaagaatagcagagtcgtcttcagagtcgccaaacttgtatatggactcaacgtcgataatagtgatgattccagattgagatccgatggcacacaagctgcttgacggggagaaagcgacggtgaagcagcacgcatcatccgcccgcaggccaatgttcatctccaggcgattgataagttcccattcccacccggtgagcttctttccagattcagttgtcccagaagattccaaatcacgagtgatttcataaaagtaggcgtgattctcatcccctactgccgtgagcagtttagagtccggggagattgtcgcatagttcatacaagtcggatgatgaaggaccgtcaagactttcgcgcgagtcaacgaatacaccgtgactgttcgatcattattgctattcatctgagtcagcatgatcaacgaaaccacaacccaactttccgaccagcgcccacctcagaaccacgatatcttcatccgccaagtcctcgctaccaccatagaaacgatggatggtcactgaattgacaatgctcccaccgaacccatggagctctacttcgggggataatcggctgcttcgatagcgggttgaagcagattcggcattgaaatcacccggagctatgcttgacggtggatcgagatcgagtgggagcgcactatctacatcggcatggaagggtgtatctccatggacctgcattccgcgatcaccgatgcgaatgaaagcacattcgccattttccgggccccccactactatccaaccatacccggcaaccagacagcgcggctcaaatgggagtaccgctacactctcgcgcttttgtgccgatatgtgtattgaatagacgattctctcgacgacgacataaatgcgatcgggatcagcagtactaatgtagttgcgaagctgtgtgtgactaaaacagagctctcttgggttaggctgcgcacggaagataagcgggttgatcaacgaacaagttggggatcttgaacgggaagaagcgtcgcttggtcggaaggatgagagcctcggttgggcgatgtctaagacagccacgttagaattattccggtagtgagatgcaccaggccttacagcagcgtagaatccgaggtcatggtggatagagctaagccagagataacattgtttgagcggggaagttaggaagacaagagaaacggggcccccgttggagtatgtcaacttgacagttatttaggcagcggacaccttgttttgtttcttcttagataaatttccttttggatagtctgtgctctgcagtgttcagtgtcaaactgcccggtgctttcattggatgacgtaatacttgggactgggacaaaaagccggggaaccgcaaattccaacgaatgcggtttgattgtcaccccgaaaccggccttgatcattcatgatgatgcattacactgtttatatctttttgcttactttaaagatcctatatactccatggtgcatagtgcataacatatacgtgttgcccccagtcccaacgatctgggccaggcattgtttccccccaaagtacggagtacatgaattgtcattgaccatctagatctaggcggactttcagctccattttcaatcttgtctcaggttcagccgaatcaacgaagcggagtttgccgactaggtcacacgacaccttgagagtatgactggttcagctactggagatacacgattttcgcaagtgttatgaggaagaaatgcttattgcgaccattctgtatggtatttgcaccaggccgtatacaatatggacctcgggagttcctcggagctcttcaatatttgccacacggcggaatgatgccattgaactgccactcctccgtactactacttgagatatcaggcagagtatgccgcatacatgattactatgtgctccgtaggctctactcgcaatacatccctatatccctaccctaatatccctacatcctatggcaatagccctatatccctatcctaatccaatacacctatgtcattgtatacccgcatatacggcaccaggcggtgagctcggttacctaggaggccatcgacaacaaggccatctctgattggtccgatcccgtgattctaccaagttcgacgggccgaagctctccgtgcaatttctatttccttcttcctttctcttcgattccatctctctatcttcatctcttcaatcgcatcttctgtccttttaatacttcacgattgaatcgctggagtttctctttttctctttttattaattaatttatcatcacaatgcttcctcgcacaattactcgcgcagtaagcttgcccttcttcccgaacaatcagcgcgtcacaggttactgactcaactctctctcagctcccgcgcgctgctttcgctcgcactcctgcctccagactcccagcctcattccggagatggaactccacagagggtggtgaggagaaggtaaagggccaggtcattggtattgatcttggtaagtactggcgcgagatgaaaatcatcaatgacgacagtattttaactttttattttcttaattataggtaccaccaactctgccgtggctgttatggagggcaagtcccctaagatcatcgagaacgctgaaggtatgtgagaagaaatttcaactccggacaagtggtcagagcttcggaactcagacttgcatccaccgtatgatgggcttaaatggaattagcaactaactcaactcttcaacaggtgctcgcactactccttccgttgttggttttgcacaggatggtgagcgcttggtcggtattgccgccaaacgtcaggccgttgtcaaccccgagaacactctgttcgctaccaagcgtctgattggtcgcaagtacaccgatgtcgaggttcagcgtgacattaaggaggttccctacaagatcgtccagcacagcaacggtgacgcctgggttgaggcccgtggccagaagtactctccttcccaggttggtggcttcgtccttaacaagatgaaggagaccgccgaggcctacctcggcaagcccgttaagaacgccgttgttactgttcccgcatacttcaacgactctcagcgtcaggctaccaaggatgctggtcagattgccggcctgaacgttctccgtgtcgtgaacgagcctaccgctgctgcccttgcctacggtatggagaaggaggctgaccgtgttgtcgctgtctacgatcttggtggtggtaccttcgatatctccgtcctcgagatccagaagggtgtcttcgaggtcaagtctaccaacggtgacactcaccttggtggtgaggatttcgatatccacctcgtccgcaacatcgttgccgagttcaagaaggagaccggtgtcgaccttaccggcgaccgtatggccatccagcgtatccgtgaggccgccgagaaggccaagatcgagctgtcctcttccctccagactgagatcaggtaagcatttccaattttggaacatcttagtaggccagtaactaattagtaatttttcgcacagtcttcctttcatcactgccggcgccagcggtgctttgcacattacccagaagctgacccgttctcagctcgaggctctggtcgagccccttatcagccgtactactgagcccgtccgcaaggccctgaaggatgccaacctccagtctggtgacattcaggatatcatcctggtcggtggtatgacccgtatgcccaaggtcactgagtccgtcaaggccctattcggccgtgagccctccaagtccgtcaaccctgatgaggctgttgccatcggtgccgctatccagggtgccgtcctggctggtgaggtcactgacgtcctcctgctcgatgtcactcctctttccctcggtatcgagaccctcggcggtgtcttcacccgtctgatcaaccgcaacactaccatccccaccaagaagtctcagaccttctccaccgctgctgacatgcagaccgctgtcgagatcaaggtctaccagggtgagcgtgagctcgtccgtgacaacaagatgctgggcaacttccagcttgttggcattcctcccgctcaccgcggtgtcccccagatcgaggtcaccttcgacattgacgctgactccattgtccacgtcaacgccaaggataagtctaccaacaaggaccagtctatcaccattgcctccggctccggtctttctgacgccgagattcagtccatggttgaggagtccgagaagtacgccgagactgataaggagcgcaaggccgccattgaggccgccaaccgcgccgacagcgtcctgaacgataccgagaaggccctcaaggacttcgaggaccgtcttgacaaggctgaggccgagaccatcaaggagaagatcgccactctccgtgagttcgttgtcaagagccagtctggcgagagcaccaccactgctgaggagctcaaggagaaggtcgacgacctccagactgccagcttgaccctgttcgacaagatgcacaaggccaacaacgagcagcagcagcagcagcagggtggtgagcagcagggtgagaccaagcagtaaatgcttttctttctatgactgccacacctgaaccgcacatggttactgtatttttctatcttcccttatgtttttcctttttttcagagactccctgatttttgcatctccttcctcgcatctacctgtacacatactttcaaggccctttttacccctttgcgttttctggtgtatcggtgttcaatctaccacacccatgtatgatcctatattcttttctcttctgcccttgtgtcactgttcaggttatcgcctggaggtggtcatctcggggttgtctacaattgtatctaatgacattacggcagtggggccacaaaaaaggatgtggtaggctttggttttcatgggcatgtgacaatagaaatcggacaattctcctctcgcttcacaatcattttccaactgtaggtctagttgcatcaatgctatcaacgtgcagtgcagatgtagttctcacctatctgcgagtgacacgcgccgttgggacatttgctcgcggatgcagagttgcttccggcttattattagtttccaactcaacatacatatgcatgtaggtacttgaccacaggcaaacaacactgctagaatctctatgctgcactctgcatgtacgccgatttatctggttaaagatgacataatgagcgttatattaagacaacactacggagtaactatggagtacgatatctttggatatctttcctccatgtttcagctcccacaaaaacgatgaagagtatttcccacggaataatggatatacatgctcggaaatataaccaaagcagcaaccaataaaagcaacggccaagctgaccatgattacgatgtacatagcagtgactattattgtccgaaatacactttaacgcatttaataagaagcagactactagattcccaggatcatgtccaccgcaaagtcaaatatctggagcgatgacaacgatgataggccagaagctcgcagctggcgcacgggtttcgacccttaggcccgccagagcgcacacgttgaaccagccaccagaaactgtatcgcgttccatcgcaccaatctattaatctaattctggcatctgggcctccactttgggaccatcggactgggtttcaagggcagcccatttggttagaccaatcgtctgtacggggcatagtgtctcatccttgcattatccacagagaatcaaggctgatttattcactagtgaatgatgggagctagatcgagaggggcgaggattgtaaggatgtgacaggggctataatcgctaggtacgatataacatacggagtacatacatccgtaagtagaagtaggtttcggcaagcttctattgtgtattgtgtcccttgtcctcccttaactttaacaatgcatgcaagttctgacaattgcccttgacatccatcaacaaaggagaagcaatacgagaaaagcaacgtcctgccactagaccaatctggactcgagtgacagaacgaagcaatcgtgcagtgcaggcttccctgcagcaaatcatcgttgtacacacttgttgggctgccacagtgggtctttcccaatgactctgtaaataattatttctcaatttctcattctaatccgaacaattatatgagaggcttggtggggattgaaatgcaggacatttgaaatagacaggggggtacttctgtcctcgattcggaagtatacgaacaatagctgcccctaccgatactatatcgaatattggattgtatgtactccgtctatactccgtagcaccgatcaccatcgcaaagtgtaagatgactcttaaattttaaattaaatctcggcgcaactagaaaaatttcaaacgcccacataacttccccctcggcgattcgtcgatcacttcttgtgtgtgagaccatctgcgttagcgtgcccctagtacgtatgattatttccatttccccactcggttgacaagctgtgttttttttttccttgttctacggttctcgtttcccttttttgtttcattttattccgtaggactccatacaagctcagccctggtgtttgttggagacccataactataatcaggaaatagaagataggactagatatgtggattttccttgatttccaatcctatttgttaaatattctgtgatatttatgttatatcgtaggatgttctaattacggagtccagaaaagatacataagaaattaaatagattgccagacaataatatgtggaggaccccgaatggagatgtagacgtgaggatatcccatatccaactccgtaattcttcccgcttctatggctaccatggaacttctcaggaacaagttctccccctgtgttacataatgatcgccaggatgagaacagggtagatctgttgcttctgattggactgttcattccggaattaaggacggagtaggaaaaattcaatcgtggaggctctgattcgaggctttgactatcgagtttagcttttagggtctacgatacataactcgcatactataataaggtaggttacgcctattttctccggggaaagctaagaaaaacagaaaacataaaacctgaatttctaaattgaccggattcccaatttccaattcccatttcccaattccctagattattagaccaatgacgctcagcagtaatttttagactggtcatgtttacgctccccctgaaggagatgtcaagtgacttccaattttggtcgatgtcgatcattggtccggtcgatgatagtctccattctgatccaagggctttggtgattgtgatttgattacatgctagcgttgtgccaattccatggatgggatttggtgggaaatgaatctttgctttgtttgatactatacagtatggtatacatactctatccctatcctatttactatattcactatactcctattcaacactatgatctatccgatcaatcacaatcctcccctgagtcgatcccttacgccgttacgggcattttcaagataacgggggtgcagaagggtcgagtggagtcgcttcttactttctattattatattatttgacatatattatattattgttttgttttgttttattcccatttttcccatgtccactttatcggtatagttagctcaaggtctgaatgtcaatcctttccaaaccgtcgacccatagatcggagatgggtcttccctttcgatccttgtctcatcctgttttcttttctttttcgacttctcttcctttgaacttcttcatactctcttcagcttttggtgcaggagggttccagactgtatcacctctcgcacctccccatccataaccatgaccactgcaccgccggtgcatcactctggccccgatagtggcatccccggccatctcgtcaaccatctccctcgctaccatcccattgccatgaatccaaatccacctccacaccagatgccgccgccggagcagatggtgcagagccaccatttccgccatttcgcgccgcccatgcatgaacatcatccgcaaggaatcccaccaatacacagtccagcttccttggaacatatcgaagctcgactccggcatctagagcacgaggagatggtccggaatgcaacccggagtcgcgtcttggcaatgcgaaagcatgaagatgaggaatttcggtcaatgacggagcgagccgaggcagaggaagaggtaagcgattgggatatccatctggtgaattgagattctaaagcttcacaggaccttcgaagacaacggaaaaagttaaagagagagtccatgggactgggcctcaatgccgcgggcgactcgccgcctcttcggcctacaccacctcgccgattatcagagacgagtgcagcaaccacattggcatttttcaagcagcaaacaccccccgagccccgtcaagaaccccttccatcttcatctcaggcgccgcctccctcaatgccgccaccccatatgcatgctcaacctcatcatcaagctcccccgcctcccccaccatctcagcatcaacacccaatgcttccccacgactcaatacaaatacacagcgctggctccatccgccgcaagcaaaaatacactatcaaaaacgtagaggcatggggcgaacgccacggccgaccagccgcccatgacccatccgggcgagcgttgtggaagagaccgtccgacggaagcttagtatatctcacctgcccgatccacggctgcgggaaatcagacttcgtcaccctccatggcttcatgtgccatctcaccaagaaacacaaggaccgcactctgggcagccagtcccgcgccctcgaagtctgcggtgtagtctacgacccgaacgctcccctcccgccagtcatgaacaaccaccgggcctcaacagaaggcagtcccctgggctccaatcccctggaccccgacggcgaccagcactacgaggacatggactcggagtctgaaggcgagctcgagcgcgagggctcctaccgagtcaagaccgaagtcctagatcggttcatgcccgacgcagagggcacccccattgaacccgctgcggcaacaccccccaagcacgcagccaacggatcaaccaagcagtccatctcgtccatcatcgaccgcacccccgaaacagaatccagagaggcgctggcgactcttccgccgtcggaatctggtatccagggtccgtcccctacatccaccgagtcgtctgtgccctcgaagcgcaagtacgaattctcgccgccggcggaaaaagaaaatgcggagccttagatggtgtgcggaataatgtttatcttcaatgtcgatttccgccggcaatacatacatacacctacataatttcttgagcgtctacgaatatcagcgctgtcgatatgataatctattgcatcatgctcttgtatttcttgtgtcggttagatgtgcttcgggcatgtcttttctcgataccctttcgttatatatgggttggttttggcgtcttctattttatttgaacatactggctcgaagctgtgcgcattaccatataatgcttcatagctagctgcatactgcatactgagcatttcggagtttatccatgcgtcttttgtctcgctgtgaatcacagccgctgggggtacaaaatcaggagattatgagagccttggctaccggaaagtgctgttcgggtcttctgctgctgtaaataaaactgtctcgagatatcggtaactccttgctatgtatatagtacacactcataagcacaaacaaatcaagcacctgttgataacatcgcaagcttcattggtggtctgaagtatgtttagtagttcgtggatctcatctatagaggtctgaaatccagactcatattcatgttagtccgagtactcttcaaagtccctcaagttgatcccgaatgttgctctaaacaatatagctagtgatgaccatctgtaggttgtttctgattttagtatgggaaagcctcagcctaggacagctagctatatacagtactcccaagataggtatgaacaaagccacctatatgtacttctaatatatctacatctatatgctatctatccctcaccaataacaaatgcaccaaatatccagacccactcctcaatccctccccaagcacatcatccctcaacctccaaacccgaaactcccgcatcgcctccctaagccaagtctcaaacacatcgggcgaccgctgctgctgcgcaataatacaaaccgtcggtctgcggcgctcccgcagttccccagactcagccacatacgccggccggagtcgacatagctccgcgcaggtgcgcacgaacggcgccacgagtgcttcgttgtagatgcagtcacaggaaagcaggaggtcgaagcctttatcttcgtctccttctccttcttcctcgccgtgagtctcgtcgagatccatacattctttcagagaggcggcctggtcagtctcccagtccagggttgtgaaggagatattagtgacaggcttggcggtcgttggttttgattttgatttggatgccttgctcttgctttttgctttgctgttgttgttgctagagacagggacggatgcattagcgtcgagattcgtgcggaacaacttgcgcacgtattcttggtctgtggcgatgtagtggcgtacggagggggctaggacgagcgcgactagtgcggagatgccggtgccgagttcggctactgttgaggtctggctgaggagggcggttgtccagagcgggtttgaggggttggttatccattctgcgaataaaggggtgattttccataggactgggtttgtagggttagtattggtttaatttcgggatggatgatagtaaatcgtcaaagcgggtggtggttgtggatcagtcgggaagtcgccaaggtatcccgaggtctgagcaagggaaaaaaagggtcaaggccaaggctaaggcatagcagggcaggtgacaattacactatgaacctcgtgtttggggtagaaaagcacagtgtgacagtcaccctccccgagagccgaggcacagacaatcatcggattggacaattcgacgcctcgaccctcggcctggtctgggcatcggactcgggtaaatgacctgcggagtacggagtagtccgtgcttgggtttgctggctctggggattccggggacaaatcatagaagaactggtgtagatcatgcgagctccagtcttggtgaaccggagtccgtacttagtacttaccggcgcctgtagttcctcccgcacgatgggaggagagtaatgctggtgattgatgaattatgtattcatggtcgttgatggagatttctactgatggtgcacggggattgagcatccccaggttgttgcttgggatgtcctgcgcgaagaggagaaatgactctatagtgagtttggtgagtgactgggtaggtttggggtatcgtattcggtggcgtaccctcatccacgtcaatgacctcttcattggcgagtaggttgatgagttggtccatgagttggtatctatggatgttatatggatgttctaatgtttttatggaacttttatgggttgggtagcacgttaagggatcacgggaccaaggcatataaattggatattggatatgaaatatacccagaatacaatatttatgccaatcccagtgcttctacacttcgtataagagctatgacttgtgaagaattgttgggaaacccaacagaaagggataacgggacctgactgaatagtaacttagcgcttatttatgcaatttcgacttatccataacaaaggcttaatttcaagaaggaatcaactgaaacatattaaataaaaacaagactccgtgcgtggtgaaaatcccaaagtcccaaagtcgaatatcaacccgaaaaccttggacctcctgcgtcatttgccgaccagccacatatccaacctgccagggcccaactttctcctcttccccggtgaatgctcagttcatatctcattttaataccccatcttctttcttgacttggtaagattctattccaactcttgttctaccccgtggcttgttacagctcgtgtgctttgccccttcctagctccgtgctattcccgcactagctaaccgccgtccccatcgcgtagaagatctttttctttaaatatcctcgatacccggccccttccgctttccctttgagcgagacacacagtcaacatggcgacgcaaaacattcacctccagccgcgcatggtcaagaagggccctttctcaatcgaggcgcccggatatgagcccgtccccggtgagacaatcccacgtcgacaccccaaggccaagaacggcctcattacgaccctcgaggatgtctctaccacttatgagaatatgcgccggtctgctcgcgtctttggcaacgccaaagctgtcggcagtcgccggctcatcaagacccacgtggagaacaagaaggttaagaagatcgtggacggtgttgagcaggaggtcgacaagaagtggacttattttgaaatgagtggttatacctacaagagcttcctcgaatatgagaagctgtgtctggagcttggttgcggtctccgtaagctgggcttcgagaaggagggcagaatccacctctacggtgcgacaaggtaagacattgcgcctccaaagagattcggagccagatgactgacttgattattcttatagcgcacactggctggccatgtcgcacggttcgttatccctatttccatgacgcgaacaaacccactaacctactacaggtgctgcatctcagtccgtgacaattgtaaccgcgtatgataccctaggcgaggaaggcctaaagcactctatcgttcaaaccggtagcactgccatcttcctcgaccccggcctgctgaagtcgcttatcgacatcctccggagcgtgcctacaatcaagcacattatctacaacaccgacacggaaatcgaccagaagattcttgatcagttacacagcgagtttattcacatcaatgtgctgagcatcgaggacttgcgtaagcagggcgaggagaaccccgtggagcctgttccccctaagccggaggacctgtgctgcataatgtacacctcgggcacaacaggcgcaccgaagggcgtgccattgacacacgccaacgtgatcgctgccagtaagctggaaagaatcctccgaactgtctattaagctaatatctcgcaatagctgctggtgtccacaccgtcatcggtccctgtatcaaccacacggactccctcctgacctatcttccccaatcgcacattctggaattcatgttcgagaacctgtgcttgttctggggtggtaccatgggatacggtaacccccgaacgttgtccgatgcctctatgtggaagtgcctgggtgatatcaaggaattcaagcctaccgttctggtcggtgtaccggccgtgtgggagtcagtgaaaaagggtgtcttggccaatctaaacaaggccagtttcgtggtcaggggtatgttctggggtgccatggcagccaagagtttcctcatgtccaccggcatccctggctcaaacatgggcgcctcaattttggacgccgttgtcttcaaaaagctaaaggaggcaaccggaggccgactccgtgtcatcatgaacggtggtggccccgtctccaaggaaacccaggtgttcttgtccatggccatcgcccccatggttagcggttacggtctaaccgaaacctctgccatgggtgccctgaacgaccccttggcctggaaccccaatgctctgggtgaaattcccgcctcgatcgaggtcaagcttgttgacttccccgatgctggatacctggcctcgaaccacccccctcagggcgagattttcatccgcggtggcagtgtgaccaagggctacttccacaacgaggaggagaccaaggctgcgatcaataaggatggctggttcatgaccggtgacattggcgagttcgaccccaacggccacctgaagatcattgaccgcaagaagaacttggtcaagaccctgaacggtgaatacatcgctctggagaagctagagtctgtctaccgctcgtctcccgtggttggcaacatctgtgtctacgctgccgaggaccaagacaagcccattgctatcattgtccccgtcgaggcggcactgaagaagattgcccacgagaacggtatcgatggtgacaccatcgagaccctcgttcacaacgaaaagctcaagacgatcgtcttgcacgagctgcagtccgccggccgcgcgggtggcttgaagggcattgagattattaacggtatcgtgctatccgacgacgagtggacgccgcaaaacgtaagtgattctcaagttatctggggctcgaactctgctaacgagacattagggtttcatgactgctgcgcaaaagctccagcgcaagaagatcgtcgcccgctacgactccgagatcaacagggcctacggcaagaaataaaagcgtgtcaaggtgcttcattcactggatttcgcttcgcccttgtgttttttattcctattttatttccctgctgtattgcttgcgctttgagaccctctctgttattttcactgttcaatttatgattatctttcgtgactcttgctcttattgatattctgccacgatgaagatgatatagtaatcaatgtgggcatgaaatgatcggcatcacgaggacttagtctatcgtaaattcgtaatcgacatatgggcctcgtattctatagaaatactttttgattggctattctcgcacccaaagaggtttttagtctaagaatgtcttcaatgatttcatttacccggccagctatcatacatccagcaagtctatcatatacacagaagtacaagcatgtacgtagcagtgctttgtccgaagtatcccggtacctcatttatcagccacagttacaccaccccccagcaattcacaagtatccggggttgtccatgtacctggcaggacttagcggcagacaaaaagacacacgttcgaacccgtcgcactggtacagattgaagtatagtcatagagttcgctagcctcagttaccaagcaatcccgtgaccgaaagtgtagatatctccacgtgactctctgtccgttgagtagcaagttgaaagtcaagtcacacattgcccccattattgcctccctccaagactagaataatctcattcccagtccaaatgtctctctggaggtacgtgacacagctctaaaccgaccaaccccggcacacaccaacacccggactaccgaggcaagaaagaaagtcaagaaactaacaagcctcacagctcctaccgcggcctcgcccccaaaacccgggccctgttcggtatcggtctcatggcctgggcaggcatcggactctggaccacgccccaggtagaaaacgcattgggcatgcagcctacgagagaagagcaggatgcgctggatcggaagttggcggtgcgcgtggtgcgtatcggaggggaggaaggggagatatcggataatcgagcaaactgagcaattgatgaattcgacgaagacaaggcgcgggaatggactctgggagctcatgtgatcagcccatgggctggtgatggcgatgggctatggggtgtgctttgtggtcggctgtgattatctacgggagtcatgggtgcagtctcacggaaccacggacttgaacgcgactggtcaggaaagggagaagagggaggtgaagccagttcgttgcagactgccgggctggtacggaaggaagtctttccctggggtatttttgttgagtcaaccttcctccagaaactcaattgcaattgcaattgctgcattgttgcaattcgctgtgcccgtgtccgtgccagacgtctaaactgtctatctacataccgcatctctatccatccccccaacgcatcgggactccgggattcaaaagaagacccggttcggagccggatggtcacttactatgtacctacactggaaagcggtcatagcgaccagtctgccactgtttgtctcgtcttcgcgtcccgccaagacaaaaaaagaaaaacaagcaaacaagcagtgctcagtggctagtggctgacgccccccgttctcgatgtccgacagacctgctatgcgcgtgcacgtcctcatcggaaagaccacagggaaatcattccggccgtaccctgtctttgcccatgctcatgcccacgcctgtccgtgcggctgcaacgaccccggcttccactgctctgttcgcagcacagagaagtattgggttgctgcagtcagcggccgtctttccctgcctagcctcacctcgcggacgttttattatttcctttctggggcattggttgggcattcctgtggctcggaagatttactgcggctgagagggtggatcgttgcttagcctggcccggatcgtgacatgttggttcttgtggcgaggggccaattagaggtcgattttaatttccgacctttctcttttgtccgattgggaaagtgatgcgaggggcagtttgtctggttgggattgggctttactacgattgtttgtttgagattttgggatctccttttctagacttcggtcatggtcagttcgtgggttatttggaatatgcgtgtctaggttagcttctactctagttatcgaatacttgtcgcattgcctagatgggacgtcttagggtcatattgttccaaggtaatgtgaaactattatcaaaacacgttatatcgataagtctaaagcaacaaacctcgtcggtatacaatcgtagtgcggctccgaagtattgtttcggaagttagttctatgattttattcatattgtagcacgagggacctctttacccttagaagaatcttgtgcatcccaaagatcgatgctcatcaatcggggtaatcggagattcgatccatagggactcttcgtcatgccagtctcgatagattgttttcatctttattctattcatagatgccatgatctcatccaaactcgtagttagctccccgagaaagctattttcaaaacattacctcggatctacagagcggtcatgtgttatttcgggtaggacacgactagcaccatgctctggaggccgttgaggtggaacacgaccatgctccttcgatggctgatagcaggtaaacactttagctgatccatagctccatctggaagaaataaccaggtacgttcgaacatacgtagaagctagcttcctagctcgcaatgcgtccaagacaagcggcgagagtttgtattagagcagctgtggcatggacagggttttttcctagtgcagtagcaaaatcgatcgcggagatgttcatgcagagatatcactgtccatatccgtctcttaggcaatagagatagatatcttaccaggctaattaggttaaatatcaagtcttcagacggattgtcttatgggcgtcttggctcgatcacggatagggttgattatcgtcgtactgacaacccggtgtcctttacttcaggcttgtgccttgccgctatagaacgtagtctccttgcttttactcttgagctttaaatgcagttcccgggatttgttgacgctttttattggtgctttctgtatggatattccatgctagtaaactatggtcgatctcgcgtggagatgtgaactctatgccagtcctgcgatgtctgatcttcagaggattgtagattatctgcgtaggagcaggagtgggaagcatagcaatgtaacctacttgactgtgacgatagagtagatcaataagattaaaagatgtagataagggcacatatacggaaataccatgaagtatgaaatagtggcaacacaccaggatatcaaaatgcccagcccgaccaaagaccatattaggagtgtcaactcaaggtgtcgaataagaaccccaagcgcctaggattgcccttttgtctgactccccttgtacgacgtgcagaagtacctatccaaccggtcatgagtaaacaaccaatgatattagacctaccccaagtatccgagcatttttctcaggaagaatacaaaacatttattcatttcccttcggaatgggaaatatacacccctccagtggcaaaaccacggtatataccaacgagacttggcacaaaagctggacttgaacccaattgtttcagataaagtcaaaaatagtctaattctaacaagaaaccctcatgatccacatacttactatatctctcaaatctcttaccgcatgcggatgtaaggtttctcccccggcccttcacaggggatgttattgacaaggatccgagtgtttaaaacatcggaatatgccgaggtgcagcgcggcttggctgatacgagggtatttctcctttggataatttaacatgagacatgaacaggtttcattggagagattggatcttttactttagcataccgtcgaactgatggtcacaccaacgcctgttttgtttcacctgatatacttagatagagataatcgcatgttgaatttatagctaatagccagacagggctaagctgacatgtacgtacattgtcatgaagcatgacctgcactgctgccgatcaggatctgcatctaatgatttcttacatttaataatacgattaaagtgaaatcctttatactaccttgctataaatctctgctgcctaagaaagcaaaccctagccctctcagaactcaacaaacagactgctccttaactctccaattggctcgaaacaccatgatccattctgcatgtaaccgtttctctcggaatatctgcacgtacaccgtccacgacggaaatagtgcccaccttgcttcgtttggttttcaagaccggagcctccccaaaaagcaaaagcaaagaaagtgggaattaagtaaaaaagaactagtaatagcgccacaataagccctttaatcttgcatggccttttaatgaactcaacccaatcattcgctcattcccgcaggcgaaatccatgtttgcttacttcggcgggcgtcagtctatgtagtcatcagacacgaaaaaaagagtcctggaagcaaattaccgtaggtccttgcttcaggtttgattgggtagttgagtttgggagaggtaaaaaataaaacaagtcaaacaaaacagcagaaaaaaatgcggaaaaaaggcaaaagcatcaaggcagagaccgcataagtccatatccattgaaaaccggactggcagccctgtaatagatgaagaccaggaccaggaccgcagcaaataacggttcctggctatgaagagagcaaatcggggagtttaggggtacgcctttaatgtttgttttcgaagatttgtgtttgtactataacctagctttgttgtgatattgtctttgtaccaatacttagacaatgctaattcaactctcattatcggattactataatatcaagtccagatcttaatcaaatcggttctattcgctagcatattccgacatttgcttttgaagacagtcttaatggcattctgtatgctttttctccgaggcagacacatgaaatgagacagtatctcgagtagaattggagcgaatcaaaagagataaagaatagatcacaatgaaataaacaaaggccactaatcccactagcaaccagatgataggaagaataaaataaaacaacgaatagaaatggcctcatgatcccccacgccgtcctgcaccagtgcataaccccttttccatttggtcgtatcgagcatgataaaaagagaaaacacgagaagaaatcgagataattcagaaaccaggggcaaaacaaaggcacagcctaagtacatagactatgcgaattctggatcggatcgtaacggctataattcgttgagtagacggggtcatatccaccagtattagactggcgatgttggtggggaacccctgtgtaggtattatcctgatatggatctgatttgaggtaaaggtcagacttgattgtgtccatggggtccatagtgtcaatcattgagtactcgaacccagaggaagacgaagaggagatgagaggactgtcgctgagtggagaatggtctgtaacgttaattttccgatgatcggatctgccgtaagaaagaccatttcgatgcgacgtgtcgtacacgagcatgtgggaacgacccgtttggcccagcccatgaggaatgacaccacaggtgttgtctccgccagccccatccggacccatgctaccagtactgccacggcgtccgtccttgtagtgaccgggtgaacgtccgcggacgaccagggggtgggagtggcgccgggcgatttgtacccactcagtttcacctgggaccgagctagcaacctcagcgtacagttcaacgaccagattgtaatattgttgctgggcacggcgcttgccattgttggcggtcgctttctggaattggatacgttcgaatacgtgggacgttggaggctgacatggctgaggtgtccccgtgaaagaagggttgtagtccatagattgcgagccaagggggaatcccgagagacttccattaactgttgaggttgatgtgaatgaaggcggaggtgcaggctgaagaatgacacgacctggtttgcgttcggattgcttgtctcgctttggggtgtgttgaacaagttctcgagtttctccatattgaccgttcacgatagcagaaatggccattgaaaatccacggattggttcaagggtctggtcagggtagcggatgtatagaggagcattgggaggccaaggatgaaggccaaagccgcaggtcaccgcgaagtagttgcggcgatagcaagtccacttgccctcagccggaaagggccctcgacccatttttgcttggacatctggtttcaccgtctgatattggccaccaaactctgcaacaactgtatgaaggatagtcgtgtcgtcgaaaggcggagcctcaatctggggctgtgagcgttgtggggactcgactatcggttgctgatacatattattctgagatcgatccatcccgctgtctaaggcgcgtggagtgcccggatacccatgacgggaaagatcgttcattccccccataggcaagccgatatttccaattccgcgctgtaaagcgtatgaaccgtaggaattattgcgccccatgagtgccggaatggagttcaaggcatgccctgagctctgcatccccgtaggcattccagttggcggttgactagaggaaagatcagtactgatgaacctcatccacctttacaggagcgtaaagcttacagcgctggcacccgttgatagtctgccattctatcaaagggatgctgaagtcgagagatatgtgggaagaggggaccagacgtgggcgaaaatgagtcttcacatcgcaatgtatcagtcaaaggaagtctctcgggattgaaagtaagaaagggcttaccaggacaagagtcaggcggagtcattgcaagagcacccgaactagaatatctaaagtgaagaatggctcagtaacagctcatcatggggaatccacgtgcgatcgcctgtaattaaaacagtccagaagatatcatatgagtccgggagcggcacggaaaccatgatgcgtaaaaagacaatggaaacggggggcgggggcgaaagaggcaaggacctcaagacacggcacgagctcagatgaaaaggacaaaacatcggaagaaagacatgcaggcagcagattggtatggaaggtaccgaaacaggctggactgaagttcaagctgcccggacccggaggaagcgcagcgacaagggggtcgagaggctgaccgagtggagcgcaagggcaagtccggattgaaagaatggaaaataacttactgtaaatcctgcatcaaaggatgctgtgcgtggtacctcacgccgttggtgtcaggcatggagacgagacctccgactcgctggctgttgtcgtcttcgtccgttccaaaccctgtcacatgagagttcatatagtcaccctccgaagtaacgggatcgttcaatgagaatacctccgagagaagtgctgagaaattcataggttagagatgaggaagatatatggggaagagaaaaaaaaagaaaagaaaaagacaaaggcaagagaaaacaatgtcgatgtcgaatcaaccgcatgacggaataaacagggaatgaaaaagggagaagcttacagggattcatcctgagcgtgctgataccaggtgcctcgaggaccctgaagtttttggtcaatgtaacaccgggcgagacgccaaagctgtctggcccttgaggtcttgggtggcaagaacttgatgtctagaatagcaaaggttaggtaaacacacaatcaaattctctcacagtacttgattgttacctttgacgtctggatcactcagaaggtgggtgctttgagcctatagaggtgggaaaaaatcaatacagctcctcttggtcttggagataaaccaaaacacaattctcacaagaagttgtttggaaggcaagtagcaaacacggagtaaagggagggtgggggagaaagaacgaagaagtataaatgaagataggaaaggcctttgggttataaagtgagcgtgaagagtaatacaatatagtatgctcagtagaacggtgcgtaaaacggtgcccttttcgatgttgacaggaagtagatgatcgtccgggagccaaaagtgcgtcaccggtttatagacatgacttcctaattgggcgatctcgcattaacttaagtcataggtacaaaagtacaagagaagagtgttggaatcgatcgggccagaacttatagtgttctttgcaaagatcttaaaggagaggggggtatggagaaagagaactgtagagaagaattagcccaaagcgagcaaaaagccaagaatcccagaaagcacaataatagcaaaatagcaaaatagcaatcgcaggccaacggaggggcaacaaaaaagaaaacagaaaaaaaaacaaaaaaacaaattgaaaaaaaaaataatcacagaaggggaaaggaaaagacactgatgtaatctggtgtgacagcctggggacgacgagcaaataaaaagctcttgtcccggcacaaataggtaagtatcttggtattgcagcagggtacttccacttatgcaaccctaacttggtatttaagaacggccgagcagatctggaggaatcatctcttttgacaggttgcaggaagtagatatgcgcttacctagttgtatagatgtataggtatagatagttgtatagttgagtagttcgatatgagggctgagaccagatgtatgtgattgactttatccccggaattaacaaaaggttgcaattggtatgttctacccaatgaagcttccggtctatgatattgtctagagccgttctcgggattgttggaggatcattagtctatcctggtaaggctcagggcccactagtgatggtctagccgagaggcgactataaccacgagttggatctgccagggacagtgaaatacgctgtattcggtaaggctccaatgggggtggtggatttgcataggggtccaaccataatcgaaagatatccgggttatcattttctgtgtatgatctctgtgggaaaaaaaagaaatgaacaattttctttttcctcaatcatttgtattttgaagtcaggatttggaattttgacggggtcgagcgcaatgaggagagtagcatcaaatcatcatcggctccagacagtttgattgttgaaggcgtatggcattggtcagaacaccccatgtccacgggttgcgtgctagaaggacccgacggcggctgcacggaccgtaggtaaggccggtacgtacacgttgtatgtgtttttcattacagataattcccgatgggatcagatgtcctagtgcgaatacccgacagacgggtcgctgcaggagagcgaaataagatgaaactagaaaggatagaggagatgatcgacctccgggatatgtaactatgcagacccatgacagggacggttgatgtatcagacttggaggaccccagaccaatgataaaaaaaaggcgaattaaatatgagaaatgaccaaatcgggtagaagtcctgaccgaagtccgtaatgtttccaaggtctgtcggagtagttcccgtcatatttaattcttttaagccgtaagaggctcgaggcacgagctgcggttcttgcatgaaggaactggacgatcatgcgatcgacaagttccattaagcatgttgcattgtccatgttggcggtgttcacaccgacagaaccggacctgggagagcaataaaaatagcacgttcgagacgatgcaccccaagatggagtatatctactccactccgaaagagagattgttctggtagcggtttctcttgcggcgcgaaaccgtgccctaactgcagacggggggtctccagtctccactagagaggctaaagcagctcggtggggtatacaatgattgcggtccgtacccgggagccttttccagaaatcgagcggcactagtcccaccgttccgtcaatgaaacgtccagggaactggaatagattggaaagatcctggtctccatgagtggacagtcctgatcgtgtcgacagaactgcattagtggctagaagatcgaccatcctgcaggaggctgggtgagatggcaaggtgcagtgaagaagcacccgcaagcttgtgattgggtagggtagataagccgtatattcgatttcctcagtggttatggcgggtatgttgtgcagctattcgcccccacgggcacataagaccgtgtgggtaccgaatcggtagggagtactccgaactaggtgcaggattgattacccgtaccaaggtaataaagtactgatcaactataccaactttcagaattccaagggagacaatagtgaacaataacatatttctttttgactctggggggtcagccccttcccggatgacggggctgacacgtgcaggggcggtgaactggacgagatttatgtagtaggtacgtgggttttcatattagattagtggataaactatgtaccatgtacttgtgttctgcctcctattagggcagtgcagtaattgttgatgcttaaattgatatagccagcatacatttcattcgaaggttaggtgctaaaattagggcccaggggctatattcctagttcgacattaggcgccaattgaaatcaaataatttgtgcaactaacccccccggaagacactatcagatccatcggtccacccgtgaactctccacatgtcacttttcgacatatcaactcactctacttgtgctcaggtacggagtacagaactatagatacaggaaacgaatgcccgcaaattgtccgatacggtacgtccagggctcactgcaggtacctcgaagccaatgccaataatttgactttagaaatgcatgaacccatctatggatgctctcgacatggattagccccagaaccctagaagccggaaaactctgacagcttgacgttgcaactgtctcagtccatctgtctctgtttcgggcacgtgccatctaccgagtctgtcctcccaatggttgaaatctcagaaaagaaaaatatatatattcccgtgcaacaattcttggctgcacgtcaatggcaaatccaatgccatgcccttcattgctggttacattcgggtgttcgagcttcggacagggggcgcaaagctacagctcctgccaacggtagagaagctataaccacatcccggagtcgggattgctgactcaaccgtgttattcgccctggagatcagaaaattcaaatccaaaaaagaccattggccaatctcaccagcgtacagatccagagtgtcatcccagacggttatctccccgggtcttgctgcctcagccccatatgcttgttgctccaggatctgaggatgcgacacgccccatggacccataggccatgtccaatgcgccaatcctggtcgatggggtctagagttcgaagtcttgcatgtcggggggagatattcctggacgatgactaccaagtaaggaaagagtcggcaaatcctcctatccggagacaatcctgtgaggcttttctttctgccttggtgattgagacagattaaagttttactttaccaacggccgcggcctctagggcttccatccccgagacatccaccggccttgtccgggcgtaaaaattgatctacctaattctaccagtatcttgtaccatgtcaagactcataccatgtcgagctagcacattcaaggaaaatggtatgatttccaaactaatttcccttactcgcatccatggagattaaacagttcaggcctctatggctccacaattcagcattgggtcgcctgggcacaaggttctgtgatgggttacctgtgtatcacttcttccgagattgatggttactttcagtgaaagtagacccgagtactggtggcctactgcaatgggctagaatgccttgctgtgggaaattgcaagatcagtccaccctgcttcgccttccctgtccgcgaagacaagagtttgccccgagaccaggatgatcattggcagtttccccaccctatgatcccaaactttgatcaccctggatctacagcccgccagcacagatcgtatcacgaccacgaagctccggccagaaaagttccatcaacgtctgagagtatccgaccctgtcggcgtggatggaacgacaaggcatcaaccagacaaggatgacaatggacagaagggtgtttgattggttcgccgccctccaattctggaaacgaagcttgtcaggcgaggaatatgctttggatggcgtgggatgcaggccagttcaagactccactcatcagccagcagcccatccggccgtttttttgcctccccgtggcaattctcagcccttgacaatcatcctgcgagtagctcagccaaccccaagccgtgccggtgtagcacggaggaacggccaagacaaaacttgctcaccggccgaaacgctcccagtgaagaactgcccttctggtcaaactcctcaagctaatataagtgcatcatgttgtttggcgccgacattccctgcaaggtcactaagacttcggaacgtcacgaacgccctttcacatgttgatgcagccgtggaaaagtggcagcgccagaacacggtgggctggtgagcgttttcgagagagccaaggccaaacctgcagggagcaacatctcggcctctccactgtctccgtagccccgtcttgtttagtatgggggaggccttcggcgaaaagccggacccgtaggtaagcttttcccacatattcaagtctctttcctaaaagaaacaccgatgctacgttatgcgacccatcccgttaccgggaaatttaacacgacaactgttgccgccgaggctgggtctgtgtctgacttgctgagatctaatatcgactgtactttggtactttggtgattgaccctgggatctggcacccgagcgcgtagctagtacgtagttggcctgaagctagggcacaacaggaaaaaagtccaggttgcccgagctccatttccttccgatgtcatctccactgtcatgcgaagatgcagaaaatttgatgtcgaaatgcgatccctggagccctttgaaaaatcgaacagtcgagacctgcgacgtttatcttccagatgacagattcgccgtcaacggcgtgcaggattgttgtcagccgagtccggtacctgggcactaggtgtggtggctaggagatggagatttgtcaagcctgaagccagcggcgagagagcttgcaaagagcagaatggccttggttggcatctactgttatcatgttaaccagtttgagcttttccgggagaatttgcacattaacatgtctagtggacgttcaaactgcgtttcgacccaacactgatgttcatccccacgcttatccgcacgccgaaaaagacctgaaatgctgggcaatgaggtatgttcgcagaattgcctatatattgttttgagacatcgtccgttcatacaagcacgggttgatttccatggacgcttgagatgttccatggtagcgtgaagcaaatatagaacaagtgcttcgagaaggacattattggaagtaaagaaacactaccagggatgagggtacgaccgtaaaataaccaagaaacccatgtatgaagttcaaaatttctctaacccattgcttttgtatcgaccgacgaatataagtaactgacatgcttgatgtctttttgggaatcatcattatcaaccaggtcctacagtacaaggaaaagagcttcggcccaaagataggcccgcctgagaagaaggaaacgttccattcaaaaagtcgtaagagagaaccgagaaagaagtttaagtagtgcgcttggcgaactcgacgcggagaataaggtggcggtaaccgactagcagaagaacgggttagcactcgaggaacttgtaaaaagaagatcacgaatcggagcgttgaagacatacagccatccaccttctcgcaagcaagtgctgcgtcgccacgatccgcatagctgatgaaagcaaagcccttggctctctgggtttcccgatcccgtgcaaggaaaactctggtgacacgaccgaaacgctcgaagagatcccgcaactcgttctcctctgccaactcgctgacctatttgaaaaagtcagtaccgaaccaagataaacaatcacgatgctcgtagagctcatagagctcgtagatagcagaataatggcagaacatacgtttgtaactctcagtgtcgccaaatcgtccttctcgaagcgaccacccatcttctcgccgccaccagcaccgcccttccgcatgtgaggaggaacgtagctggactttccagcaccaagaccacccgcatcgtcctccgcctcggcgccaccagcagcagaagtgccctcctcgacgggggccatggtgtccttgaagggacagcgagccgtgaaatgctctccactgcaaatacgacacttgaccttcttgtccttcaactggtccttcatgctgcccttctcgggaccctccttctcagcctccttagcattagccttccagttgacgctgggtcggaagacgatgttctcgccgacggaggtggtgtcgaatgagggaccggcggcgtggcccttctcgagaccgaacttgtcccatttgcggcgttcggcgacctgagggttgacgtgttcgcggacaatagtggtcttaattcggcgggtgaccttcactttcttgttgtcgtcattgtagcggtaggaaatgacggtcttggtgccgtccttgttcgcgatcacttcttgcggcgggagcacggaggggtcatcgaaatcttcgtcgtcggcccagtcggcgcggctgtaaaatagaaagatttgttaggccggtgttttttgtaggatgcaactgtgtatactcacttcccagctggagacatggtgtaagtgatggtgttattacggctgctgaatttctggatttctttcaaaggcgaatccgttgtggatttaataatttactgtggcacagctgtggctggtggcggaaatcacgtggcgtggttccaagttctgttgaacctcgttctactctccgataaacatgatggcattcagcgagtttcattcccttcaaacagagtgaatattcgcagtggtcagagaatttattcgccctcattccatacttcattttgtggcacttttcctatctagcaccgagcatagcctcaagcaaggctagaatacgctccctcgatatgcctagagccaaaaaatgacacggacttccattgcttcctctaaatgatccttctatgtacgttggcttgtcagttccagataatcttatagttaccatacagactagtcaccacatggacacacaaaaacccattgtggagtatatactcgcaaataatatcaaagtcccgtttcaaaatccttcaaacccttcaaatccttcatgtcgtcttttgaaacgggattcacgatttgtatctatgctctctatctcgattcttcagatctgacaggagctagatagccacctaccgctgcaagccccaagtttggtgttgatcggggcgaaattatgtgccatgcttgagaagcgtttttcataagttcatgtattcactcagatcatcacaaggaataatcttacttagaaaatacgacaagacaatgccactcgagtactgttatatcgacctcttactcttaggaagtctagcatgcatgaatacatcatcattttcttcccttgatcctcactggggggtgtaaggagggaatgaaatagtcgccaagagcactcgtgattctctcatatcgctgcttccaggtgggatcggtctttgctacagtggctgtccaggcaaagtagtcccataggatgcagatcttcttactaggcataagaagcctgaatacgccaacgacgtaatccgtaaaaagtgccatctcccagcgagagcggatcatcttgttgatcctccgttgttttttgctttttgcttgcgaactgcagtttttggcttggctggaaaacgcggtatgcactcgttccgccaaaccccccgtccacccacctccaccacccaatcctccccatcttcctcacaggaggtgtacgggcttccacatcatcccctgcatggatcttctcgccggtcccctctggctgctcgccaacaatgatatctttcaggctattttacgatatattagcctctgtgcatacataggcaaagatccgccaatgtagtttccatgagaatcgtgtttcaccacttacggggtatcctcaatgtcctcgctcttggaggctggtctcctccaaaaaaaaaaaaaaaacaaaaaatagccggtgccagcaaggcaccagctatgacaatcatgagggcccaaaagcctggcacggctaccaactgttggctcatggaccgagaggtcccggaggtagaatctctggagcatgacacagagatgaggcttcccatgctctttcttaatgaagatagagtaatcagaatttgtaggataaaccccatagaaatcagtacatcatgaagtcacagataccattctcggggactttgcatctgacagacggatatcagctggtggaagttcgaagtcgccgtcgtcatcgaagtcgatcctgtcgtggtactgtaggtcgggtcctgcagttgcgattgacagttatagattgataaagatatgaagaggaagagatgtgataatgaggtgtgaaggggataagtagagtcaagtcgcgaggggaatggaatgtgaatttaaccgggctgatatgatttcagaagtgacggtaatgtaagagttagctgagtgagaactgggggatttggcgtacaagtcatatagaaggtaacatttaggagtgatggtaatggaagggtaggtgaggaaggctgcgtgcttatatatatatcgtattagggagagcgagaagcaaaggcgagtatgtaaaggtgtaatggaagattcctctttttgtacattaagaacgcaaaccaaagcgtttaaatggccatatcatcatttgcttctcacgtgtacaaaatagcataaaagatatctagaaacaaatcacagatcaaaaatccttcaaagcctcctcagtccaatcccacaacctctccgcaagcgtatcatccctcgccgtctcatcaagcttcttatcctccaacttcccaacaggctcataataacccccattccgaatctgcgccttatccacagtagccgcccaagtctgattcaacgcaccctcatgcggcagcacaatcctccaccagcttatcgcataaacaagcaacttctccttaagcccaagaccactaacaagacccgtccccacaataccaggatgcaccgatacagacgtgatagccgggaacctcttcgcgagctcgcgcgcatacaccagattcgccagcttactctgcccataccgccgccacggcccgccgaaccccatatcctgggtcgtcttgagtttttcgaagatgatgccgccgtgcgggtgcatgccccatccctgcgaggtaaggagcacaatgcgtgggtctgcgcaagcctcgaggaggggtaggaactttttgatcagtagtgcgtggccgaggtgattagtgccgatttggagctcgtagccatcgactgtttggcccgggggttgtgccatgattcccgcgttgcacattaggatgtctagggtttggtgttggctggtgaaatcctctgcggcctctttgacagaggccagggaagataggtcacattttatgaatgtgactgcgagcttggggctggtttcgtggatttgtttgatcactttctctgcgcttgtggcgttgcggccgctgaggtagatatgtgatgggttgtgcttggcgaggtggattgctgatgctgcacctagcccgccggttcctggggggctgttagttttggacttgtggaaagcagatggaatttggtttatacctcctgtgatgaaaattgacttccccgcgagatcagggatatctttttcgggattatagtcgagaggcatggtcgaggtgtgtagttagggctagatatgttgcgcacaatatcaaggtttgaaagtatgttggattgacttggaatagagaattttagtttgaaataagaagcagattaagattcttgccctgcttttatactgggaggtgcacgatttccgtacccaaagatcaaacatcaactttccggattgggaaatatgcttgaaggctccacatgtggcttgcccagccaatggaaaccaagagtttccgagctcgccaatacaatccgcctatctggcagtcttgatcatgattctttacgttcgctggaacggcttgatattgtaccgaagagcaagtggcgagttttctgaattcccccgagtccgacggtgaagtggcttagacgaatgtcagctatgtagcaatccttgtaatctccgttgcaaactccggttgaaaatcgttgaatgttgaaaatgatgcaatatgttgtaatgcaactatgcaaagataatgatatgcacaaaattataaccctattcccaatctaatatgtacatcgcaaaaacccaaaatcaaaacttatcgacctatcatacgaagctcaatcggtcgcaagatgcaatataccgcagcagcaaaggcaaagcctagctcaaatccaacgtcaccaccatatgttgggtcaccagcatgcgcggcgataggacccatccaccacgtttggctcatgcccacaacaacaccggcgacgccaaaggcaaacgcaatagctgcggcgattcccatgggcagcttcttgggatcgtcgtagtcctctgcagaatagccaccgaatccacgtcggaaaacaaagtggtcagcgagtacaatgccggagtaaatggccaaccagtaggcgataagggccatgaagttctcgagaacggtctcgaagtggctgtaaccggggatggcgatggcgagggaagcgcacgaagcgaggaaagtccagatgaatcgcgggacgcgctgcgtagcccggctcaagacctgcaaggtcaagccgaccgagtagatgttggggcagttgttggcgataatggacagggccaggacgacgaggcagaacttgccgaagccgccgagaggttcaagcacggctgcgagcaggccaccgttgactgaggctgcatagccctcggcgtacttgttgtgaactccgtcacccatagccgtcgcggacatgacggcgataccgaggaattgggtgaagagaagggggacgatcagaccaagccaagcagaaaggaagaccaggcgacggctctgggtctttggctggtagacagtgtagtcggcagcgtaactggtccagccagttgcgaagccatagacagtggatccaaaggacaagcaggcacccatttcagaaactccgactcccattgggatgttgacgaaatcgccggagtgggcgaatgtgcccaacacaatgaaaaacacgatgcaggtgggaatccagctccagtactcatacatgtgaacatacttgtacccagcaaaggtgacgaaaagtgtgcagaatgtgatgatgaggataccggcgaatccagggactttactgttcaccgcgttgaggagctgggcaccaacgatggcattggcagcagaccaacccacacaggcgatgatgttaaggacggcaactagacatgaattagcaaaattaacgcacacaagctgatggagagccaacttactgaatttcacaggccaccatccaaaccagaatcgcgagagcaccatctggcgcagtccaaacatgggaccaaagcacgagaagtagcacacggtcatgacaccgaggaggttgaaaaagagacagaccaagatggcatcaacgaagcccaaatcgaatgcagatttaccaagaacgccgatggcgaaggagctgacgaccatgtttgcggccaaccactaggtttggtcagtggaaaaggccttcaggccacggcgatcacgccaggtaattgcaggaacacaccatgctaccaatattaagataggacgtatcagtccgctcatgctccggaactcgctcgacacctcgctgctcgatgttgagcttgccggctaagcgctggatcttggcgtaaagtgaattgccatattcgaagctctcgccgggcacggcgccatcgctggagttgtcgaagagcttgttgctattttgttcggaggcattgttcacctggggcgccttttccaggtcctcatgtgaggggaacattttggaggccatgtttgcaggtcgaatcctcattaacgtaaggcgaagaattggagggagacgagagtatataatcgggagtaatcgaagagctgagtagtctcagcgagacccagggagttcaggatgaagggattgatatcgaatcagtgacacatcctctctttcttttttttgctccaccgaacgggaggcgctgttaatatagtattgtgtcgcgagaattctttgcgcgtccggccccaccacgatctctcgcactgtggcaaggatattcctgtcgcgtgttcctcgaaaagatccataaaactcagagacgggccgaatgacaagcccttgaggccccatcaatggattaggtggaccaatcaggacagccctgccaaccctagcttatcaggacgccgagaattctggccttcgcttccgtctcgggacagttggcgttgtcattggccgacggagttgtgtgaacggtggaagtggagtgtctcgggactcaaccctggagataaggacaacctccgactcccgatacctctgatagtgacattactcttcactccaccttgggccagtgaaccttctctgaccatccttttaccaatcacactggcttgatcttatcattatacaggggccgtctacttggctgaactttgtctacacacaacacccctgattggcagcatgccacgcctctctgcctttcaatcaagcttctgggtccttgccagacgggacacgccgatgtgcgtgaagcttagcaatgcttttttaatcttcacgtggtgattctcattatcattattctgtttatgcgggggaattatccacgttccacgcgaggcgaggacctagcgctattggtaccccggatgttctcgggttggccccagtatatcccaaaagcttatgtttctcagatatgtgttgctttaatcctcctcaatcagaaacgggacggctgcgtatagcctgtggcagtgattctcgaagggtcgagcctgtcggacatgtccgcgcatacccaagcgaagacaatttacatgtttgtcatatatttggcttttggccaacgtatccctaccaaaggctataataagcacggcacacggtggcggagattgccgcgctggacttcattggtgcgatcgcacatgagaactcttgacagatccgatcatgtaaactttgcggacgagatctctcaacagatccgatcgtataaacttgctacgatctatgcttgatttgtctagtgtgctcagcgtgaatcaagaactcttcattggcttagaggctgtcgtgtccaaccagacatcatggtactttggatcaaattgaagagagtgatattgatattcgtcagatgcaatgattactgtttctcctgtctattcaaactcattcagacaagagataaaggagctttccgaaagttggactattgaggcatcggatacctccgttcttccagtatttcctcatctctatgtgagcactgagcagttcagctcaatccacgaatttcgaagctgaacttctccggtcaacattatcttacttcactgctggcgcaatatcgctgtattagcaatttagattagcctttgagcatgaagtcattgaatcctcgctctccttcagccgtactccgtacatcccgtttagtcgatttgaaccatgacaacatcatccttacctatcccgcctgtgtttgattgcaccccttctccccaatagatagtaagttacatcgtgatacacatttaccccttgcacctccagtccagagagcccctcgtcgctgtatatcaccgatgcgagtaatagccgctccttccaagaatgccctccaactagttcctaccctcgacctcgagggaggtggttagctcgaaacttatctctcgcagtcttttgaaacaataaaccaccaagacgaattcttcattacgcctctacatgctcgcctttgcttctcgctctacctaatacgagatgtgtaagcacgaagcctccctcaacgcctacccttacattgccatcacttctaaacattaccttctatatgacttgcatgctaactcccctcgtgctcactcagctcgtcactcctgaaatcatcttatcagcctggttaaatcatattccatcctcctcgcgacttgaccctacttgcctccacaccccattgtcacatctcttcctcttcatttctttaccaatctacaactgtcaaccgcaaccgcttaaaacctgacctaaaataccacgacaggatcgacttcgatgacgacggcgacttcgaacttctatcagacgatatccgtctatcagatagcccggggattaggatagagggcggatggtagggtttgacggaacgagtgcataccgcgctttctgcctgagccagaaacagcaattcgccgaagcaaaaagcaacggaggatgaataagatgatccgctttccctgagagaagaagatctgtatcctctggtactactttgcctggacagccactgtccagattctacctggattactcgaagtcaagaatcggaaatacaatgggcctctctacactggacaaggatatttcgtcattgaaagaacagtcagtcgattcacgtcggccaatcctcggtgaatggtccggcaatcccaaaaatctcagtgaagtggaagagcagaacgcagtggcacacggcgacaatatcaacatggcatccaagccattacgtatttgcttcgggaaaacccattcagagctcacaaatgggaagcatcatttgcccatttctacgatattacatacaccgaggctaaagataacgcctctctacacaaaagtccccgccttcgtcgattattcagcctaaatgccagtgttcaatccttacgccgatttgcccaaccttgcatttgaaagagagcaaagtatacctaaggtgtaagcttgttgagcttcatagatagcccaatagaagcctgggctcttgagtgttctcatctgaatttcctttttatggatgtcacagccgcatattcggtcacattgctattgggaaccctagtgcccaaccctggaggaactctgctaacatcgtcgttatatagataccctattttcgcgcttgcagtcgcttgtttgatcacgttgctgtggcgagccctagtatcctttacgaagtggctctaccgatgtcactgtcaccatagctgcccaggttgttgcgtgtcagtcacattggcatgacgaacgctacctagttctagtcttcgccaacataaaaatgttatagtggtcttgccctattcttcccttcttgcagtctcattaaaacaccaaatctaatagccttgaaaggctgatggcctccgactaagtttatgatgttccaaccttggttggcaaacctataagattccaatgtacagtattccaatgtacacaataggcgaaggcggagtatcaactctagggcaagagcgatcaagctcgactagaactttcaggcacgcgtcacttcgacttcgatttgttgatacctctcgggctgttgttttctttttctttcacgtcacatattcacaccctcgcataatcgttatctatctttcctgatcattcacatcctttctttatctcgtctgtgattcgaacagttggatagacgtacaaaagcaatctgaacaaaatgagcctcgtcaaccaagagacaagctctggcactgtgcgtcgtcgtttatactcgctatcatcggtctttcgcccccaggcaaccaagagagctaggtacttacatacaaagaacgaccaaagatgaaagagatagcctgctaaccaagacatcagcatatctgatgcagtgcaggaggagccaacttgcctggaaaagatccactaccctgtgtttgatcccctggatcctcgtcacaacccagagataccgaccgtgctgtgtcattccaatgagcaacaaagttcgtcttcggggtcacgcagtccaatggcatgggttcaattcctctcaaagcgaactcttcataaagctcgatcaggtctattggcattgaaatcagggtttagtcaccatccaagtgaccgtccaagtgaagaagagccccaggagagaagctttgttagccccgttgctctcagacgcgaaattcagcttgaaagacaacgccacgcaatgtcatccggggggtacacttcggatacacaagaggacccgaactttggcgcccagctatctcgcatggaccttccaccgtcttcaccatcatcgaatgatgaaatggagcctcttgtccgcgtccagtctgtttatccgatgcctgcgcccaatcgatacgaatattctagccgccccgtaagtaatgtcagggtaaactcgacttccacactagccaacggccgtgatcttgacttccaatttgctggaaatgaagagttggaggcgaatatgaattttgaggatcactctaatcacacaattccatcgacagaaacgtatttgatacagcagacatggggcgttgcaatctctaccgacgaagggattgaaacgtccaccaaagaactggcagatcctcaatcagttcctggagagcagcaagcaacaaatcttcagcagcaaaatatcggccatgcaagttcagatacacaaaacagcgatgatcaaccaatttcagttcccatttcgagacagtcttccgccgaagttcggtttgcatttccaggaatctatcatgaggcgctcaatgagtgggcgagacaacatggtagtccaaacctcagtcgacacagtcttgatctcattgaatacagtcccaatcccagtcatcacagttccagccccatccaacacagtctcagcccacatagccacaacctcactcaacacaacctcagactctatgaacaagaagaaatcccgtgcgctcctcaagagccgttcgaccgcattgtacttcaggaagatacacacagcggcctgcctccgtatcctggatacgatgaaggtcacatacctttagtattttcgcaaagtccaatcacacattctgaagaaatgcagccattttcctatcccaatcccctcaattgtatccccaacctgaattcggaagaaatatggtcgtctacctccgaaagagcaaccacccagtggtcaagtggggaagattattcaagccgttacacacctgctgataccacatcccgagatatcacatcaacggaaatgacttcaatggaatcaacgacaactgatacatggtctccatggtccccgatggactctgaggtccttttccctagcccagtggaggatggagatgagtatttccttgttgacggcaaaagcagccagtatcccgacggaggcaatgagccagtcaaatccacacggcataccaccagcaactgtgatactactagacctcaaggaccgactgagttgatccccccagggatcatgtccctacgactcatgtccaatggtattaccgatgcagaattggaatttgtggaagaggatacagatgacgagttctatcctggaattgtacagccaagacagttttggtgaaatacctcgtcaatactctaacctgaagggccgcatgtctcttttgaccaaatgtattattacctgaaagatgttttcatcgcagtagttcatcccttcaacatattttctgtagacctattctttgtgctaatattctaagggggttgttaggaactccctagcaagacggtagatacctacaaccaaaggggggtccctggtacaatcccctatataagttataaccaactccagtagtccaagagggacgggaaagagaagtatctcatctatgagtctatcttggtagtcataagtttccactaggttgcaatcaatttgcaaataaggagaaatggaggttatcggtttgtttgcgtggtctcttactgcaagcgcaaagtaaatctgcattcataatcgcatctatacttcatggtatcacatatttgaagctacgtagatcactggataattgatctggctaaaatattcaaaaaatggcatcaccaccagcattcaacgccactcctgatagaatcaacaccataactcaagccatacccaaaccaacctgttcctttctctcctgccacacattcttacccgagcacgagcaaaccatcttatcattatcccacacacctgcactgcgcgcaataacaccaacaagggtattctcatcctcgcgcttgaaaggaccctgcgtccccttggaaaccaccatacttcggccaataagctcccagattgccacaggccggtccaagaacacactaccccggcccttattgtcaacatccacggtaccgagaatgccccggcactccttggccggggcgacagtagcatcagcgccaagcattttggtcttcagagactcccagataccacccgtagactcggcaccgcgggagatatctcccgcttctcggatagttgtccagtatttgcccggcgcgaggccgttgattgtcaggtcgatgagggtcatgttcggggagacctggaccatgcgcgcgagtccgcggatattgttggagacggtcgttgagtgtgtttcgaggatacatacggcggaacctgtttggtaatttgtatcaattgaggttgctcatttatgtcgcatgggatagtaagtagacaccggggattccatactgttggtagtaccgctaccacggaggatggcatcgcggccggtgctctcaatcgcgcttacgatggagctgggaggggcggtgccttcgatgaagactagctggtctttaaggtttgcttcaactttattgattcctgccgcggggtcagtttgcgtgaaggtttagatgctcgcgtgagatgactaccttccaggctatttagagagctggatatagaattcacgcagccttcacaggtcattgggaccgagaaggtcgtctagacataggaaccgcattagtactggctgtttgtgagtcatgtcgctcagacaaggctgacctggaatggttcaatcatggcggggaagagagtatgtgcacaattaaaagcgaaggatctaaagcaagatagagagaaagataatcttccagaagagaaagatcagaaggagactaaatatcagaagaaagatgtgcaatgcgctatacaaactcaaggcggggcgttggatttcaaatcgaaggaactcggcttctgacaaaacgtcattcccgaaccttctcccttcaacattccctcacgcaaaatgtcatcccgatgggcaaatgacgatccagaaacagaagcaattgtcgcagagcaaaaacgcgtcaaggaacaaaaaaaacgcgctaaagcagagaaacaacgactagaagaggccaaaaaagctcaagcgcgcgatgccaacgccaatggcgagctaggccccccaacaaagcgacgaagactctccaacgacccagacgctcattcagatgatgccgaattgctgaagatcgagaaggaacagaaaagccagtcgactctactacgctttccggttggagaatgggggccctgcagacatgtggataacttcgaaagactgaaccacattgaggagggctcgtatggatgggtctcacgcgcaagggacatttcgacaggagaaattgtcgcgctgaagaagctcaagctggagaactcgccggacggattcccagtcactgggctccgggaaatccaaacccttctggaggcgcgacatcaaaatgtcgtttacctgcgggaagtagtaatgggcaataaaatggacgagtgagttctccgtggttgacactgtattgtctatatatgctaatcaattggttccgacagtgtattcctagtgatggatttccacgaacacgacctcaaagccttactcgacgagatgcgcgagcccttccttccttcagagatcaaaaccgtcctgctgcaggtgattggaggactcgaattcctacattcacagtggatcatgcaccgcgacctcaagacctccaacctattaatgaacaaccgtggcgagctgaaaatcgccgattttggcatggcccgctacttcggcgatccacctcctaagctgacacagctcgttgtgaccctctggtaccgagcgccggagctgctcctcggcgcggacaaatacggcacggagatcgacatgtggagcattggctgtatcttcggcgagctgctcaccaaagagcctctcttacagggcaagaatgaagtcgaccaggtgtccaagatcttcgccttgaccggaccaccgaactcagaaacatggcctggatttcgtctattgcccaacgccaagtccctgcggttcccctcgacatcggcaccttcttcagccggtaacccgcctctgctgcctcgttcccgattcccctatctgaccaatgcgggtttgagtctcatgtccggattgctggcgctgaatccagcctcccgtcctacggcaaaacagtgcctcgatcacaaatatttcaaggaagatccgcgcccaaaaccgcgagagatgttccctacatttccatccaaggctggtatggagaaacggaggcgtcatcacacgcctgaggcccctaaacgagggcaggaagcacccgagctggactttgcaggtgtctttggaggtgctccgggtggagataccggcgaagtaggggctggatttagtcttcggttgggataattgcttttttcaacatgaaagtaaataataacagattttgtttgattgtatttcaatctatattgtataataaagtctaccttgaagatatcttctggcttagtactgggtgtccctttaatatttaatcaagtagaacctttgccaatatatttgaaaaacatctagcataaaaatgacacagaaatataaaacagtctcagggccaatggctaactatagaaatgtggctatgtataactacggagtaatcaaggaggtaaacgcgcttgatagttcggctccaaagctgatcagctccgagcttctttttttttcctccaacctctcaacgtctggattcatttccttccatacttttatttattgatttatctaatattatttttacgatggcaaccgaacagcccatctcgtttgacgccatcattcaggctggtaattactcccttgccatctgacatctcgcagaatctgacccgtttttgtccacagatcgtcagaagaagaagcaggaggacctcgcaaacaaactcttgggaaagaaccgcagatcaagcgcgccaggctcaggttcgggcgctggcaagaaagtgcagaataaatcacagaatacaaagcctggaagcctagcaagcagggtcggagtaaccaaggtatgaccatggatgcgaccacatttgaagaacactctttgacaatttctcgcattaaaatttagcgctctgcatcagcgaccgtgcaacccaacaagaacaagcctgcgcccaccacgaacaacaatcggacacacggcaaacctggcaagaatgatcgcgtgaatgcggatcaggcccgggcagctttgcaatcccagaacggccaaatgaacacacgatcgggcaacgtcgcgcagaatagccgtccactcggtggcagcaacatgactattaagggtgcttcgggtccgttctttgtcgtcgggaggaactttgcgccggggacaacagcggccgacatccagtctgctcttgagcccataacaggtcccatgctcagctgccagataatagcaagccagccaagtgttactgcggcatttgcatatgcagataagacggccgcagagctagttgtggccaacttccacaaccagagggtaaatgccattcccgtttgatgatatcgcgagatggatgctgacataggctctctaggctgacgggagactgctcacaatgacccttaaatcgacgaagcccgcaacacagcaagaccccttcagtgcgctccgagcgcaagctgaccaggaacgaattcgagcccgtcgtggcccaagccatctgaacgacctcctatccgagaaccggggaaactcgccgactggcctctacagcgatgagatgatggtcgatgcgccggcgcggaatacccagaagaaccagaaccaacggagatggcgtcgttgaaacgcatggctagcgtttttggtaaggagtaaccactgcgcgaagtggtcgtggagatcgtgcttcttgcactctcatgaaatgtatgatatggtcacagcagtttatggacatttttttagcatctggagcagtgtgtttttgcatcagatagcggcgaacaggacaaaatcggacagaatattaatgttttattggctttttttcaacttctaggtcaatccgttcccattttatttattactgtcgctcctcgctacttgtttacacccccgagaggaaagaaaagaagtcaaactaaagaaccaagacaaatctgcaacaatgtcctggaacatcacttgttcagaaactccaaatataagagatatatgtatcccggtcatctcatgcccccaaggggcacaaggactagacgtgactgaagctcaatataaccaaaagaaaagacacaaaacggacagaacaggcaaaaaaaaaaaaggaaaaacacgagtataatcaagtaagacgagaatatatgaccaggaattgatctccagctccctatgtatggtcaaacattccttgaagaatgattgatcaaataggatcagtgcatggcggtattgcgtatgctggattgcaaagtggcacatttgccaatatttcggggaggtcggttcccacgtacatagcttcagagttattaggcacactcaaacaatatagcatatggtgtagccagagaccagatagccgcaaacccgtagaagcattgcggggcccacggcttatacaggctcgaatatcagtccatcgggggaggagtggctgatcattgtggaagatgttgacttgcaataccacattatctaccgggacctcaccagccgctgtacccattcttgttgtaccagtgacaggcagaccggcgccactcagtcgttcaatgtacagtctatcggactggtggatcttcattgctatagcaccagtatcctctataacattgaggtgtacggtatgttgccatgtgtttttttgccatgtgttaggatttcggatcgatacgatgaactgtttgatgttaacatagattctgaaatctcacttgggaggtcatacctcatgcatggcgtaccctctctggagcgggggcatgtagaagaacagatacatcggttctggtttgtagtcgtccatctataggtcaagttagtactgtatgcagaaggatatttctatatcctcatgttgggccgacttgatataacaagagatctacgtatgcatgaggaataggactcagagccgttatgtattcgaactcactccttctacccaaatacccgctgggccaagctgcctactaagagcgtaaaactcttccatttccatcttcttgggaccgccaaccatttttccgtgtgcccagtaagtgaccttctctttatcccagacaaggtgcccggaccggtaggcagccatgatggctatcacgttgggggtatttccattgtcatttcccaaatagttctaaggccattctgaccccttctgtaacctgcgaccgactaggctattgtatagggggttgtaaattggcaataattggtggaggtcggcggggtggtcatttcttggcacttatatatcatatcgccagtggaatccagaaggttggagtcttgagtcacttatttttttatcgtatatatatggagagctgtacatacaaagaacatttttctggtaaaaatcttgacctctaattacttcattcttgaggtccagcattgcggcggagagagtcgacccctgtaccgcgtagtctgttcgaggtaggattgatgcctggaatcgcctaatatctttcgcgatggtatcgacggagtgaacttgccttccgtctgtcattatttattgttatggccccactagccgacgcatttggtggtcttctagcttctggtattctgaagctagatagtgttggctctctctcgagctggcgaatgatcttcgcgattgaaggcattattactatctgcattggtattcttttatagagatatgatcagctccgagcctaggggtcttagctgggaagtcgttcaacgccttgattgtctgaagaaggtcaaaacaagctttgatgagttgccactctcccagcggagggttcgcaactgatcttcagctatttctgcttacactgccgcagaaagcaccaggcaatcccaccacttgttggcctaaatcgagtttgaaatgagaagtagatggagaaagctacagcgaccaagaagtatgagtattcaagagctataccgtcgtcacacacttgctacagcaagcggaccttaacccttataagtatttctatccttaggggaataaccggcataccaatataccgtgttgacccacattgctaggcgaaccagttagccagataaaccaagctgattttccaggcaatcaatctggagataacttactcatggcgtaaatagcaaatgcttctgcgtccttgtgcccttgtgtattgccgtttttgtcaaggccgtctgtccccttggcgattcgactcatacacgcaaggttcagcgaattctgggctgggctagtgcatttcacgtcaactggtatcatgtcagatatatctcaaggagagggagactcgaagagaaggaatgagaaggctcactcagcgtcttgcttcctccaccgacgaacgcctccgcgtgcgtcgactcgtggatcacggttgacacgaggaagtcggacagccactttataccccggccctcctttccaatgaagtcaggctgagccagcagtttctctatggcactcttctggttcgtagttgggctcgagccgatttcaacatgcaggtcgcggtagtgcagaccgctccctatccggctagtttcgacctcagtccatttgtcgaacttcaacgaacagaagaccatggtctcctgaactagaccataaatcgctccgtacacatacgccttgattcccggaagcgcgggcacggggccgaagcgtgtctgatcggccccgtcctgtagtgcacagatagcttggtatggcacccagatgccttctttattcggtgtacctttcgtttgaaagatccaatagacgtatgtcccaccttttgcgagagaggctatatatttgaggcataattagcaagggttgaaggtgcgggtttttacctcaccctcggatcgatggacgggtagatggatggcccttacggtttgtcttcccggtagctgatcaacatgtcagcagttaggatcggggatccagaaatccagggagggatcatcaccttcagtgtatgtcaaacccgcgctgtctctctcggagtacacatcggcgtcattgcagtagatattgatatacgggaatccaccccgaatccaacggacgggccgacctgcaaggtaatttgcgtattgcgattgtattgttctggccatgtctctcgttcccttgagcttttctaggccgttcttgtttcgaggatcgtcagggccaaagtagtgctttgtgataaacatgacgtaggaagcgaacgcattgtgttcgtcaaaagtacgctgcgctctagtcgccttgctagccttgaggtttccggagccgtcctcgttgtagaggctgatggctagctctagatgggctaccatgttggatatctgccgctatgtatcagcatcatagcagtagggccaggatttgggtaacacttacgatagcgctagcatcttggatcgcctgggcgagggttcctgagaagtcggaattgctgcaaccgaagaaaacttcccgcttctcgatagacctactggataatagggttgcggatgtttcattaaaggagacttccttctccagagccagtgctgccagtgcggcagaaaatataccagcccataaagcaagccacccagagagggagatgagattcatgccgacgatgatttacttcgtagtggcttccagagagccttaggtgatgcaacactcgtacggcacatgcaaggtacctttagaactttctaaggacaagttgaacgggtccccgctgaattaacagaatgaaaataggcagatacttacctccaacgaagaaataattttcaggagtgcgggaaaactattcgaatatttcaacattacgatatctaacctcggcctcatgatgtctctgcgtggtagcattctccttcacgcgcgacctgaactgcgcaccaggtagaacaaaaaacaaacatttgttcggccttgcagcgtgggaggctagctgggaggccgagcttgatgcaacaccaactataactagtatagatctactgaaatgagagcagtcaggcgtccagtgatgcaatctacgtaagactactattatgcaaaggagggggtcgttacattccgacggagcggtgatatttgagattatgttgtacgcgaattatgcttatcctttctagttctagtgaaagagagaacaattttccattcaagagtgtctgtatagggaaatcgatcatcagagctgacctctcagatgatcgacatctatgctccaaatttaaggctcgcagtcttatccaaagagcgtatgtcagcactaatgcagtagcattgtagggtgtcatgggcgcctgttcagctgcaggggtcaagggcagagcggtcctgatatcacacggagccgacaaacaaatgcttgtttatcgagcttcgctacatagacatgtcgatgctcccttcgtttttcccccacccttctcctccaacgcatggcaactgccttccagttgcactgtttcccctgtcctatctttttgtcttgaaaatccaagatgccgtggacgattctttggacggcggtagcaccggtcctctgcgtattactatcactcggcacaccggcctcggctttgagtacccactctgaacgcctagctgcagctctgaatgccccgggtgcgttccagtcgcagctcaaaccatgtccagcgccgtgtgctagccacgagccccagcactggactgtctatgcttcctttgaccggctctccttctgccatgagccaattcttttcgatatcgccattcacactcctgtgaatgactcttctaagacgctaaagtttcgcgcctgcaccacaggtgatggctgggatgagtccaggaatgccggtacaattagtggaacggtctatgcgggcccctccgttcgggagtccaaggtgacgctacaggttgcacaacagaaatctgcaggagcagctgaaggcaccagtgaggatgtaatcaccgtgctcacgcaggttcaggcatacctccacgcagggatggactgcaccaagaatattatgctgggttactacaagggggtggttgtcggcgtgtatgccggccaggcattgggtaaagctacagcttcatctgtgatgggccaggtcctctccaagttcaagggagcggctcccgcgaccacgcttacacagctgtgcgatgatcagcgtgacgcagaccatgtctttggtattgccacttcaaccgtagcggacctttctgctgtacaggccgcactggtatcatggagtcaagggaaatgtgagagcggactcggcgacgcgacctcactcccgaatgtcagtatctgggaggtaccgcaacatccagtcggaaggaacaataccacaacttcagatcctaccggtcaggaacttgatgcgcccctcctcgctcgcacagccaaatactgcaaaaaaaggacggttgtctcgggtgacatctgccagtctctagccaaggcgtgcggtatcaccctcgaccagttctacaagtacaactccaaggaaatgtgttcgaacctgaagattggctcgagtgtctgctgcaccgacgggttcctgaagccacagccttacgataacggcacctgctatacatacacgacacagaccggtgatacatgctacgatatcggccttgcctggagtctgacggccaaagaccttgggaaatttaacgatggcaccacatggggctggaacggctgcgacaacctgggtcacagtcagaacatatgtctcagctcggggcaccccccgatcccggccgttctgcccaacgctatctgtgggccgcaagtgcccggcacgatcttggacagccctatcaccaacgcctcggaatttgccttgctgaacccgtgcccactgaactcgtgctgcaacatctggggccagtgcgggattgactcaagcttttgcaccctgtccaccggccccacgcggaatccgggcacatcgaagccgggaatatacggctgcatctcgaactgtggtaccggcattgttaataatcatgacggtccttcgggtggctaccagcgcgtgggctactatgaggcgttcaactgggaccgtaaatgtctgcacatgcgtgcacagtggtccaacacacttgactacacccacatgcactgggcgtttggttctattggtgaggacctgtctgtatacgttaatgactcgcacagccagtggtccggctttatggatctgaaagacgtaaagaagatagtttcctttgggggatggggtttctcgacggatgtgtcaacctacgacatccttcgcaaagccatggcccctgacaatcgccacaagttcatttccaacctcgttgcctttgccaatagaacgggtatagacggaatcgacattgactgggagtatcctggggtattgataaccttttattttgccctttcggtggtacgcaagctgctgacagtaggtcttgtctcatctaggcgcctgatatccccggaatcccccctggcctcaatacagatgctcccaactacctagcgacgctcaaggcactacgacaggagctaccagacaaatattccatttccattgccgctccagcttcatactggtatctcaaagcgttccccattagcgatattgcgaaaattgtcgactacattgtttacatggcttacgatctacatggtcccacccccctcccttcccccttcccaataccttagaggtagtctactaacatttgacattgatctccaggccagtgggattatggcaacatgtacacgcagtcaggatgcaaaagtggcaactgtcttcgcagtcatgttaatcagactgaagtgcttctggcacttgctatgagtaagaatctggcccccttgttcatcggcacatgtaattctagttgaagaaagttttactgatgtgcccatcggtcaacagttaccaaagcaggtgtgcattctaacaagataatggtgggtgagtcgagttacggaagatccttcaagatggccaaacagggttgcacaggaccagactgctttttcactggcacaaatgagacctccaatgcgaagccaggtcgatgcaccggtaccgggggctatatctcgaacgcggaaatcaaggagattatttcgcatggcggtgaatcggtcaagacctggtacgacaaggacacggcctctgactacgtagtctatgagagtgagtatcttatttttccgacctctgccatcatccgcactcagcatcattcgtcaaggagaccttatacttatggattgagatacgcagatgatcaatgggtagcttacatgagttataacaccaagcaggcgcgaagggacacatggaagaaacttaatttcctggggacgattgactgggcggttgatctccaagacttcaatgtggctgacaccgtcggtcctacgggagactacaacaagtcgtcgtgcatcaatgtcttcgacaacatgatctggaactgggtcaacccggtcattgatgcccccgtcgggtgcacaaatcttatccaagcgtccccattggcgacaacggtgacccgcacggcatacaccacgatcacgctggtgtccgggggcaccgtcagcactaccattgtgtctactgccttcctcgtttctgaggtcgattaccagccgtttacgatcgcctcctcggatacggagaatgggaccatcatcacatacaatcccatcccgcgtgtgacgccgagccccatggggattcaggtgccgaaagggtgggcgatcacttcgcccgacggcgaggtggatggtccgtccaccaccacagacttggttggtcttcccaccaccaccaccaccaccaccaccgatgcaggagggttcatagtctacattacatggcagcccacggtaagctacagcctgccatcattcgtcacacccaaaatccctgcacccaccatccctgacgacgacaactctcccacccccatacctgatccaggagtaaccgactgtatcggtgatgcctgcactaaggggcctgattgcaccgacagcgactgtacacgcggtggagactgtaccggccccggctgtacccgcggcggcgactgcaccggtccaaagtgcgtccggggcggagtatgtacaggccacaactgcgaggaagggggtcgctgctcaagcgatcactgcgtcttgggtggtgggtgctcgggtgccaaatgcaacaaggggggcggatgctcaggtgccaaatgcaacaagggtggcggctgtgtgaaaaccttactgaataattgcagcccgggaccctgcgtcggtccgtcttgcattgatatgagctgtccgtggtgcgacaacggtattaccatcacggttcagcctggggggaatcctgcgcctacacccaggcctacctgtctgaacaactgcccgacattaccttcctgcgcgggcggcgccacatcgtgcaacgagccgtgcaacatcaatcgctgccccgcgaacagcatgccgaccggaaaggcctgcacgagcttcaccactgccagtgactgcacggtaattatcagcagcacggcagtccataccaccccgacgaggagcttctcgaccaccacgcgaactcgttgcgagacggtgatcgactgcgacgtgcaagatatgacagtcacaaccaccatcaccaccagcgaggtcccggacgcaattgcctccccaacggggatatacgactacgagaacgactctcactataatcaggctgtgtttgcagctgttgcatccgactacgatgagtgggaaaggaccgcagacaccaccacgaccacgaccacgactacgacaaccagtagcacacctacgactaccacttcaacctcaagtcctaaccctaactacccgaatgagttcatgatattgaagtacgaggttcacacggtatactttgatttgagtgagaagcactcctactcttggtccggtgactactacgcctacaatcaggattcgacaaccgagaacgtatgcaccaactcctaccgtgtaactggccctatcgacgcgggcgctagtgatgattatcctgcatcactgggtacttttgatctccctgcacagtacacgggctgcaagtactccggaagtaccgactctgtagggtcggttacatgcggctcaaaaaccttctcgtgcagcaaattccaagattatgacgggaaaaccgccacgtttgattgcggtaagactacagccgatggtggtagtacatatatataccattactactatgaggcgatccagtgtgccatcacttactaaatgatccccccggcgttgtgatatcaaagaggataggggaattctacaataaaagaacaattataactatttgcgttattatatgtgtttttcaaggctcaaagcagatcttcctttaacatctccgagtttcagaagacaaagtttgaaattagcttacagtgtcaaaactagagctagaaagggccagcggctatataagcctaaaactcatgcttttccctttgcattttggacgatcagtctgcgctctgaataaagccgcacttcgtacccgcatcttaagagcctcccttcacgtggctttccctcttgctttcttttaaagctcagctacaggcgacgccctagaggatttctatggattacctggatgggacaaaatttcgggcccacttatctcggtgtacaatagataatactaattagctagtttgaggatagatagactcggcctcttgattgaatctgcctatgtatactattgctagtggctacagctagtactgtgcttattgatatagtctttagggcttggatttccgagccataccatcttaggactagcggccgataaccgtccgataaagatatgatcacgtgcagtggagcttccgcggagagattgagagaaacatctcgacttggcgcaaggcaatagaaggagtgtttggcccggtcattttgtttacctgccgcagacagttccattgttgtatatctgatgataagaacaattactgccccccaaacccgagccaagaatgaaccagaccacgaggcgcgtagcgtcgtacgtcctccgtagacctcgcaacccagtacttctgagatgcccagggagatggaactccacatttgaacagagagaatggtccacgccgctggcaaaaacattggccagtgtcatgagggtaaatatgcacttagctttaacctctctgctcttttgctgatcattgacaccgcaaattaggtcacaggtcccgtaccaatcgcggcgttcatgcgtcaggtattgacttccccagatggcggatattatacaactcgaggggagggcggaggtgtcttcggcaaaaatggtgatttcgtaacgtcgcccgagatctcgcaagtctttggagagttgatcggtatatggactatcgcggagtggatggcgcaggggcggacaaagagtggtgttcagctgatggaggttggtccaggaaaaggaactttgatggatgatatgctacgggtgggtagttgcacttatacctgtcttccttttataagaaagagctcattggactgaccacgatttctataaccaacagactttccgaaacttcaagagcttttcttcgagtgttgaagctatttaccttgtggaagctagtggaactctccgagaagtgcagaagcggttgctgtgcggcgagaaggctgtgatggaggagacagatatcggccatcggagtgtgtgcaagtacttcgatgtacccatcgtctgggtggaggatattcgtcttctaccgcatggtgagtgatgctttcaatccggttttacccttttgtctgatgctgaccaatgacatcggcgacacagaggaaggcaagacacccttcatcttcgcacatgaattcttcgacgcgcttccaattcacgcattcgaatctgttccaccatcaccagagaaccagattgccaacgagccaagaaagatcatgactcccactggcccagtagaactacataatccgcccaaacacgcaaacaccccgcaatggcgtgagctaatggtgacattaaatccaaaagccgtggaagagaacataaaaggagagcccgagtttcaattaaccaaagccaaagcttccacgccgtcatcgctagtgatcccggagatctcccagcgttaccgagcactcaagtcgcagccaggcgcgaccatcgagatcagccccgagagccgaatctatgctgcagactttgcgcgccggatcggtggtgactctgcttctgcgcttgctgctaaaaagacctctccctctagcccaccgccgtcatctcagaaaaagactccatctggcgcagccctgatcatggactacgggacattgtcaaccattcccatcaactcgctgcgcggaatcaaaagccacaagaaggtgccaccactctcggaaccggggcgtgtggatgtcagcgcggatgtggatttcacttcgctggctgaagcggccatcgaaggcagcgacggcgtcgaggttcacggtcctgttgaacagggtgatttcctcgcagccatgggtattgaggagcgcatgcagcagttgctccgtaaagtgcaagatgaagaacacaaaaagacactagagaccgcctggaagcgattggttgagaagagcggcggatcaatgggacagatctataaggtcatggccattatacctgaaaatggagggcagagacggcctgttggttttggaggcggcattcagatgtaaccggcaagtataatagacccaaagccatctcatgtacaataatcacatctttcatcaaatagaatcacatggactcgccgaacatacagaaacaatcaaacagagctcgtcggccccaatatcccagaataataaaaaaactaaaatgtaaccatcaatgcatctaagtggtatctctcatatcaagttcgttaagtctcatgaaaaaagcagatgcataaagcggccgtaaccccaccatcccaaaagggccaattcagtattcctcccagatatccgcagcataagccgcagtcagcttagtatcattgccatacttctgctgccattccacaaacccaccctcgagcacaaatacttgctgcttctggctctcttccgcaccaaacatgctctcgcgctctcgcagatagcgaagggcagcagaggggccacgctgctggctgagtgcacagtggaatacaaccatttccttgtctttgagagtgcggataagctctggcatgcgcacgtccagtgttaagctcgggacccaagttgatgagtggatatggccaccaacgtggtctgttccaactgtcaactgatagtctttgatttgactgtatggcaaaaaaatggttatttacctgagtctcggacgtcgacaatcgccaggctgcttggttcgccagttgagagcagtgtcgctagaacatcgcggcccatgcgggggagagttgcgattgagatggatgacattttttttgtcgaactctgtgaactgtatatataaagagagctattcgaagtgaaacgagggggatatggtaattttacaagattcccaagattgcaggtgtgatatttacgatctcgagaaaaatgactctaaagcacacgacacgtgacctataatttcctttccaatcgggagacaatgattttccgtcacgggaacttcgagcacctccgaccctgcgcgtctacctcgattaatctctccttcccaagcccaggagacagttcaatccacccccatagacctgctgccctgacacgagcgagtccaaccaaaatggacttccgcctcctagcccgcagcctccgcgccaggccaacaccatggctccaacagcagacccagcttcaccgcgtcgcctccctcgcgaacggagtgcgctacaattcctccgcctcatcaccaaccccacccttcaaacccacatctcccaccgaccagccaagcacggcccccgaggtggcgaagcaagcccaaaagccgacctccgagccaagcacagccgcccccagggccgcacagccagcccgcaaaccggtctccgacttcgacgacatcctcagcagactcgacctcagtaagccccgagaagcaagcagcgcccagcgtcggatcttctcagactcgctttccagggctgtcggcgaaggcgcacagagcagctaccgggcgcgctcgagagtgcctctcccttcacgcaaggtcgagctgaagctcgggccgacgcttggtcgacagattcaggttgagccggagcgtggtactgatctcggtgctgcgctgcgcaggcttcaggctactatctcgcagaatagcgttcggcatgatgctcacgaacagaagttccatgtgagaaagggtatggtgcgcaagcagaagaagatgttgcggtggaagaagctgttcaagttttcgttccagggcactgtgaagaagattcagcgtatgcaggcacagggttggtagttttatgctactccttttgctttgggcttttgtgctgcggcttgtctactcggcttgtatgtatatactgagaaggctggtgtgggtgatggactgagtgggcagagtggccttggcctgaaaattggtgttttcttttgttacttgtacaactattatctaggtacttgatttttctgttgaatttggctcttgcattagatatggaatgaatgcatcggatttgtttgactcgattacttgggtatagcatcattatatgtaaagcaccggctttttgctagtggtcaattctgcctctcaagttaggtacactgtacatgtcgtaagcgctacactatatgtacctagttcctcccagttctcaatattaatccctctttccagttggcaagacatatccacttccaagcccgttcccattgccattgccaatagtagggccggagtaaccaccatagccattgttcttccccccattgccaaaggtaacaccaggactcttcgctccacggacgggggtcgcacccaaaagcccatctccatgccaagcggatcgcccacgccaacgcccaccattgcgctcccagaaaagcgcaactaaagcgccaacagaggccgccataacaaagaacaccagcttggaaaagaaagacccagagctcttcccagacccagtcgccaaagccagccacgattccaaagcaggccgcaccggccacccaatactggcaccgccctccaaccatgcaacgtggaaagagaaggtaagcggctccccacgcacaaccttagtgccatgcccagcagtccacggctcgcgtgccgcctgagcaagggcaacaggctcctcgtcctcgtcgagcttggcattcttgccggtgttgtcgaactcgggagtcgagtatgcaacaccgccaaccacgaagccaggctgcagagactgaccaccgcgagttttggtgttttgttctgcagccgcgtccgaggccatgttgtgcattacgacgttcatatccgtccagatgtgcaaatggctcagttggagtgtgccctgcagcgcgattgtgagaggcgtgaagggtggcccgttgtcggctagtgcggagagggtgtctgcttcgcctgacttctggtccgagtctttgtccgcgtgctctgcgctggtggatggtgtcagcggcgctgttggcacgcggcagctcattggtacatccgaatggacgtagaactcgaggaggtggtacatctcatcggagagggagtcgatggtgcatgttattgtttcagatatgccgtagtggagagagagagggcgggcggtttcgttgcaggtcacgaaggggacgtattggagtttgccgagattgtcagtgacctggatgttttcgtagttgctattagctttgtgtttcctggtagtctgcgctattgtcttcgtgtcaggagacggtaggcagactggtggcgcttacatgttctccttccctgcaggtgtagaacgagcaatggttagccgtactctacagcttgattgaagagtggtctcacatggttcgattcagacatgacactgggatatcctctctcaatttgtatccgtcgctgttgtcattggtgctccccgcaagtgcgttggttggccacaatgcgcctgtcaaagacagcagcgctactgctgcggaagacgggctcaattgacgtaaaagagacattgttgcttttttctccaatgatttaaggagaaaaaccgccccgcgtcggcaagtttcagtgttcgaggattgcgcaggagtgaaggacggaggtgtacccgcgttgcggagttgcggacaacaaagcgggtttccctacgatttccccttgctgctacttccaaccacctccctacttctaattctttcatatctaacaccgaacgtgtttcgcattccattcgaaagcttacttggtaacggaatttttgggaatcattcatttcttttcaaaggaaaaatatgtggaaaatcgttgctcgtcaaaactacacatcccacagtgcttcatgaaagactaaaacactctaagacagcttggccttctgcttgaaagcaagcaacagaccactggtggagctgtcgtggtcagcaccctcgcccttggtctcgagctccctctggatgttcttcgcaagggccttgcccaactcgacaccccactggtcgaacgagttgatgttccaaatggcaccctcggtgaaggtgacgtgctcgtagtaagtgatcagagcacccagggtagagggagtaatcttctgagccaaaatagaggtggtgggacggttacccaggaaagtcttgtgagcaacaagctcctcggcagtgccctcggccttgacctgagcaggggtctttccaaccatcagagcctcggattgagcgaggaagttagcagccagcatacgctggtgcttgccaccctcgacggggttgtgcgactcagccgccatcaagaaatcggccgggatgagcttggtgccttggtgcagaagctggaagaagctgtgctgcgcgttggtggcaggctcaccgaacaagataggtccagtggtatacttgacgtattcaccggtgcgagtgatggcctttccgttgctctccatggacagctgctgcaggtaggcggggaagcggtgcaggtactggtcgaagggagcgaccaggtgggtttgagcaccgaagaagtcgctgtaccaaacgctcagcagaccaccgagaacgggaatgttcttctcgagcggtgtttcccggaagtgcttgtccatggcctgggcaccagccaggaactggtggaagttgtcgtaaccgatgtacagagcgacagacaagccaatggcactccatacggagtaacgtccgcccacccacgactcgaatccgaacatgttcttggcatcaatgccaaacttggtgacctcgggctcgttggtcgacagagccacgaagtgcttagcaatgtgtgaatcatccttggcagactcgaggaaccaagccttggcagtgttggaattggtaatggtctctgcggtagtgaaggtcttggaggcaatcaggaaaagggtggtctccgggtcagagtgcttgagcgcttcagcgatgtgtgtgccgtcgatgttggagacgaagtggagcttaatgtcggggtggccgtaaggcttgagagcctcggtgaccattacagggccgctaggtgcagatgtcagctacaattcctgcttaaccaaggacgagaaagcttacagatcggaaccaccgataccaatgttgacgatggtgttgatcctcttgccggtgtaacccttccactcgccgctgcggacctgctcggagaactccttcatgtgctccagcacggagttgacctcctcgacgacgctctttccgtcgacctgcatgggctcattggcaacattgcgcagagcagcgtggtagacagcacggtcctcggtgaagttgatgtgatcaccacggaacatggcatcacggagctcctcgacattggcctccttagcgagttggaccagaagagaaacagtctcctgggtaaggaagttcttggagaaatcgaagaggatctctgtgttgtctacggtgttggtgaacttatggctgaagttctggaaacgctttgggtccttctggaactgatccttaagaactaggttacgtcccaaggtggtgtggtgctcctggagctccttccaggcgggaaggtcgctggtctgcgaaaagccgggcatgatgacgatgaggggttctatagacaagagggtcagtgcggggcaagtgaaatatgaaggtaatgtccaagtatgtcaggtttatgatatagaatgaaacttataaacatacattgaaagtagagtggatgatagagaggaatgaagaaaccaaggaaaggcaggaaaactaatggcgtcagtcgcatccggcgcgttggggtccgagggggtcgtggggcaacatcatcattaccgcattcggctgttatttcacttgttttctttattaaagaggttttggttgtttgacttgtttttatctagtttgctgctggaattattcttcttagtactgctattatccttctcattggagcctttcacctaaaacctctccttttgttctccgcaggtactgaaaatgtatacggagtacccggtataccaattcggacacctgtaatttcgtactccataggctattgcttttactcttctgggaccaattcgattccagcgcgtttaattgtatagccgggcattggaaattgaacggctatagcttttttgtagctaaaacagtcctattctcaaggaaactaatgtgttactcttgataagatgatactagttactactgcaagtctactccgtatactccgtatgcattgcaatataccttccaaccctccaagggccggatgcatgggaatttccaatgctctctgtattgttttgagggctaatagaacctgttcatagaggatatgcaaaaagtactcctacaagacataacatgaatagattcgctggacggctaaacatggaacgtgcacgggccaatagaaaattcaccgcccatgtcaccgcccgagcttttttgttggcagctgatagttatcggtttgaattgcgccttgatcaacctcactttcttacaggtgatacgactggcttgcatcatgtacaatccttaccaaggtgagtgctatcttctctttgaccttgataaaggtcttgatgcttcggaaaacctaaaactaactcttacctagctccgggtctttatggacgcgcgcctgactacggtgcctatggtgcgcctccgggcatgggtgagttcactcctttcgcgcattaatgttattaacaatatatactgaccagtctcagcccctcctccaggaatggctgctccaggcactgctgcccccctcggcatgcagcaagcaaatatccagcctggtcgtccaggaagcttcccgcccaacttccaaccgcctatgaatatgccaaacatcaatttctctgcgccggtgattcgcttgggtacttcgggcccgaacaagcctgcagctcaggagaatggtcgcgaacggggacccgatgctcctgggcgccgcggtggtctggggtcgatgggaatggatacccagcgccatcatggtcgcgagaccatgatgcagctccagccacctacacgcgacgaggtcgtgcgcaccatttttatcggtgggattacagagggcgcaggcggtgatgatggcattgagcgcattctacgatctactggtatcttgcgtcgctggattcgcgcgacagatgctgatgacaaaccttgccggtttggctttgccgagtatgatgacccggagagtcttgagattgcggttgaaaccctgaaggacgtggaagtcccggtcaagatacaggtacccctcgccgaaggcgatgaggaacaaaaagtcgaaaagagcaagcttctagtgcgttaaaattccctccctatccgcaaatctgacttctaacttgtctactaggtcgtcgtcgacgaaggtaccctcacctacctagagcaattcgagtctagccgagccgaacaagaccccgaggaacgccaggcacgtttcaccgctgcgcgcaacaatctgaacaaagtcttgacaagcctcttccatcccacagccccgctgacaaaggaggagatatcggcccttgatcgggaaggcgacacggaaatgaaggacgccgagcctgcaaaggatggggaagtggtcactattcccatcaccattgaagatgagctggccgatatccccccagaaatgcgcgccaatgtggccaaggagatttcggctttccgtgaacgaagcacccgccgcgacatcgagcgtatgaaacgcgaggaagagatcgagtcaatggagcgtgcacgcaactctggctctcggatcaatcgacttgtttcgcccccggcatccgctcctagtggccctgctgccggtatcaacggtattcccttgggcccacgggatcgcaatgtgatgaacgcaccttctggtccgagggcattcggtgtgcagattcctaaggattatcagaagggagttgcttttgtcaatgccgatgccctcaacggtgacgacaactcggatgctagcgacgaggaaattgaacgccgccgacaggatcggctcaaggctgaacaagagaaggaattctcagacctggagcgccgctggcttggccgtgaacgcagccgaaccgcagccctggagcgagagaagaagcgtgaggatgaggaagacggaaagttgcaagctgcgcacgatgagatggaagcacgacttaacgcctggaacgatgatgtcgaggacacccggaaggcagtcgattactacgcagatcgcggtacctggctccggacccgtgcagccttccgttctcgtgaggcccatgttgacgatgccgatcgcgccgctgaggatcgcgaacgtgtgcaatccgccaagcagcaggagcaggctcgcggcatggccgacgacttcctcgctcgccaggccaaggagctcgagacacgtccccaggaggcaccgcgcgaaccccagcgcttcaagctctctcttggagctgccgcgcagaaggcccaggccgcaaccagccggcgcgcagtggccgatgtggaaggtctgctggaggacgaggaagagcctgagacaacaacccgtcggccactcattccgatcaaattcgactcggcggccgaagctgcaggtctcactgacgaagaacgtgctcaggcggcccgtcaactcgcagcagagattccggctgagaaggaaggcctgtggaactgggcaatcaagtgggaatttgtggacgatgctatcatcaccgaccaactcaagcctttcgttgagaagaagatcgtcgaatatcttggtgtacaggagcaaatgcttgtagatgtggtggaggaacatgtgcggaagcatggatcgccccaggagttggtggagcagctggcagaagtgagtatttaccccttggtcttcttcttgacacaatttactgacctcaatcccctatctataggcattggacgaagaggctgaagtcctcgttcgcaagctttggcgcatgatcattttctgttccgagagcgagaaacgaggcctgtccttgtaggttgcacatgaacgacaggtgtgcctgatgtttccgggcttcactgagatacgaaatacaacatgtacacaaaggaatagctagtggttgcatgtacaatgccaaattttttgaaatctcatactctgggggttttcaacaggatctggtctagtctgcaggtaaacaagctcccacgtagcttggggtaagtcacggagcagctccgagtatatatctgggctctgattggtggaatgacatattttcccggcatttacaattttccaccaataagatcgggtctgctgcaaatgactagggaggagagaggggtgcgggataaactggagatggcgcgggggaagattgttgctgtatatacggagtaggatctcgatgggcttttgtaatctcttctcggtgatattcttcgtctcttactcttccttgtgcatctttgagctgccaaaaaagggtagaaccgactttcgattctataccccggatatatacaccccgcatttcaggattaaccactgtgtttctctagcaccgacctgcgccagcaatatttcaagccattgacagaagtaaagcctatttctatcaccacaagtaatagccatccacaatggttaaaatcactggcttcaccacacgggacgtgaggttcccggtacgtcaatcttgcagttccatatacccaatgcactcaatactgacaagcccaccatagacctcgcttgataagaccgggtcagatgcgatgaacgcagcaggcgactactcttccgcctactgcatcatcaccacagactcagaacactccggacatggcatggtacgtcacaccatatcaccaactcacagcaatccaattaacccaacacctgcagaccttcacaatcggccgcggtaacgaaattgtctgcgcagcaatctccctgctcgccccaatggtcgttggcaaagatctagacgagttgaccacagactggggcaagacctggcggtacctcgtctccgacagccagctgcgctggatcggccccgaaaagggcgtgattcacctcgctctcggcgctgttgtcaatgcactctgggatctgtgggccaagaccctcggtaagcccgtttggcgtattgttgcggacatgacgcctgaggagttcgtgcgttgcattgatttccgctatatcactgatgccatcacacccgaagaggctatcagtctgctcaaggaggttgagtcggggaagcaggagcgtatcaaggaggcagaggctagccaggctgtccctgcttacactaccagtgccgggtggttgggatacagcaaggataagctgaaggtgttgttggatcagagtgttgagcagggatacaagcatttcaagcttaaggttggggccgatttggaagatgacaagacccgcttgcgtattgcacgggaagctattgggtatgataagggtaatattttgatggttgatgccaaccaggtacgctatcactaccgattccgtttcactttcgagtcagactgacactgggcacatgaataggtctggtccgtccccgaagcaatcacctggatgcaagagcttgcagagttcaagccctggttcatagaagagcccacctcccccgatgacattctcggccacgctgccatccgcaaggctctggccaacaccccctacggccccgtaggcgtcgccacaggcgagatgtgccagaaccgcgtgatcttcaagcagctgctgcaagccaatgccttgactgtcctgcagcccgacgcctgccgtgtcggtggtgtgaacgaggtcctggctattctcctgctggcacgcaagttcggcgtgcctatcgtgccgcactcgggtggtgtcggtctgccggagtacacacagcacctgagcacgatcgactatgttgtcgttaccgggaagaagagcgttctcgagtatgtggatcacctccatgagcacttcgtccacccatctaacgttaaggatggttactatgccaccccgttggagcctgggtacagtgtggagatgaaggctgaaagtatggatgcgtttgagtaccctggtcaggaagggaagagttggtggagatccgaggaggctaagagcattatttatgggcccagggttgtatagatttggtaatggcgagtgctgttgctctagacgatcatgtgtttatgtatatcatgttaatagctttcaaaaataggtttcaatatagtacatactcactcggttcagattggctgtggatatatatagagggctgtctccctagacatgttctcaggcgagacttgaagatagagcttgcgcaacttggtcaacagatgtggatccccaggatcaattcgactttttaagtaaatttgggatgactagcgcattgaagttagaatcccatgaaactatgatacatttattttacaggtcatcataagtgcctggatgaacggccagtggctcggttttagaaaatataagggaagcgccaagaacaaaagtccagaggctgtggatgttcaaatgctcatcggagtgaaggcgtagaacctatgtagtgcgggggtgagggtataatgagaagttagcatcatcgccagatcagcgccactgaataccgaaaagtttcaaggcgccagccacattaggcttctctgaggcttgctcgaggattatgcgagaatgccctttcacatccaacgcgagaagctggtactcaaatttgctcttatccaaaggtttcatcatgtgtacgatgaccacgccggagttgagaggaccctcgacctggaaatcacggttagtacactcatctgagattgaccggaaagggtatcatacatggaaatgcatgcgaaggtgctcacgacccaatcgatccttttcagctgatgatctagtcaattgtcagcatctcggctctctcgcattatgtacaaaccctagaacctacgcgagaggcttgttccgtgcccaccggctcgtggtctcctcgccatatgccttgatctctcttcggtcaccgagcaattttatacactcggggtcatctttaatgcgcgctaccgctgtttcaaattgcgccgtcttgctgtttggcgacaaaacctcgagatagaaaagtgtgaagactccgccctaaccagatcatagagtcagcaactattcgccaaagcctcgtgaatgaatgtagttcataccgtcagtactgctccagccaacacgataacgaagttgaaggattgctgtgttgcccgcgcaaccttctctcctcgactcaaatcgccccactgaactctcccatcgtcggacaagattgtaatgctttttttccttgaagaagtagtttgaggcccgctacctatgttgctctgcgtggcgtagagccgggcgatctgtgtctgtatgcggggagagggccggaggagaagatatgccggcgatagtccgggaagagtgcgcagctgaagagaattcattgtgaaggtcaaaaccgagcgtcctggaacaagttggagtatctgagtcgaataccggactcgaccgtcttccaaccccgaaaggttccaggttgctatcgatcttcataatcggcagcacgtgcttacaatacggtattacaatacgtcctatggcaatgaagttcccagccaaatgtgaggcgttgtatcgcgattacaccaggcacagggtcgacagagtccacgttcgccgttcccgacggacgctttgctctttgccttacctgctcacattctcgcccaaaccccctttttcttttctctttgactttcccattgatctcccctcggtacaatcatgagtgccacaaaggcgcagtctcaaaaaatctttgagaaggccaagttgaagcccgcgaacaaggtgcgcatacccccaccccgtactgtatgattgtggcactcgattctgatgtttttgcttttcaggtatgcttcgactgcggctctaagaacccgacatggtcttcggttccattcggtatctacttgtgtcttgattgttcggctcaccaccgtaatctcggtgtgcacatctcctttgtccgatcaacaaacctcgaccgtacgtactgccgcacaatttctacacatgccaagtattccggtggctcaacgctgacatttctatagagtggcaatgggagcaactacgggtgatgaaggtcggtggaaacgaatctgcgaccaagtatttccaatcgcacgggggttccgctgcgctggcgagcaaggacaccaaggtcaaatacacgtgcaatgcggctgtcaagtataaggaggaactcaaaaggcgcgctgcgctagatgcgcaacagtcagtggatctacacccggaactggcacgactacgtgctaactagtgttattgctatatttaggtaccccggcgaagtcatcatcacagatctccccgccggcaccccctcagatgactcgaacacccctgctggtgacggcgacgatgatttcttttcctcctgggacaagccctcgatcaagcgtccgagcaaccccccttcgcgcaccagtacgccccccgtcgtcagccggaacggatcccctttcctgaacgctggtgcaaacggaaacggagcccgctcgaaatctcccttgtctgcttcggaggaaaagagcgcttctcccgcgccggctgctatccggcacaccagcgttagtcggaagacctctacagctagctctgcaaagaagagtagtgtcctcggtgccaagaaggcacccaagctcggagctaagaaaattgccgccgcggatattattgatttcgacgaggcagagcgcaaggccaaggaagaggccgagcgtattgaaaagcttggctacgaccccgaggctgagcaggcggaagacgaggccaagaaggctgcaactgctgccgccgctgttccgatcgcctctcctgttccagtcagccctgctggcatgtccaatgaccgaaactccggtgatgtggggcgactaggcatgggtgtgagccgacttggctttggccaagtgtcgaagcccgttgcccccaagaagccaacatttggttctattggccctgctaagcccaatcccgctgatggtaaatttcctttccctcgttgattgtacgtcacatgaaagataagctgacactcgacacagaagcggaactcagccagaccaaaactcgatttggcactcagaagggtatctcgtccgatgaattcttcggacgggagcgattcgaccccgctgcccagtcggaggccaaggaacgtctccgccaattcgatagcgctacatccatttccagcaactcctacttcggccggcccgaggatgaggtcaattcgcttgacgatggctatggtgatatggaggttgctgctaaagacttcatccgccgctttggtatcacggctggagatgatcttgagaacctgtcgcatcttgtgggcgaaggtgcaactaagctacaaggtgagcaagtctctgtttgggcatggacccacgttttgctgactgaatatcgccaggtgctatccgcagctatttgaacaactaggctagctgcccatcaccggatattacgccttttatcactccaagtaccttagcaagcaacattgttccctatccccggttccgtcatcttcctacgcgacgtatattgtgtctcccctgtccatctcgccctttgacaatatttctttacttggaaaaacattgcgatcagcagtcggccaaaaacttgggtttcatatcattctggtttgcgatctggcgattattttgtcttctcccttgctttttcgcattcctacacagcaacatggaatgatcgaagggaccctttattttattttgctcatttcgttgatatggtttaggataaatggtttaggataatcgagaaattcatggtttgatattattgatagacaagaatttttgacaaaaagtcccgcaccgcccataactccatgatgaatgaagataacacagtaagtagtacatcacagtacaagtcacatccaagtgttgaatacaaaaaaggccctatatataaaaaagccgggcaaggctatacagtagcaagtacgacctcaatcaacgcgataaatcgcatcggcaaccttcgccacctgccacatctcatggacatcatgaacacgaacaatgtccgcgccaccagccacgctagcagagacagtagcagcggtaccccaaacgcgctcccgcggcgtcttgaccccagtaagatggccaataaatctcttccgactaggccccatcaaccaagggaagcactcgagccccggcatcgcccgcagcctaggcaggtcccgcaatatctccagatcatgctcctgaatcttcgcaaagccaagacccggatcgaggatgatgcgccagcgccggatccccgcgtcttcggcagccgcaatgcgcgcgcccagctcagcagctacttccgggataacgccggtcgggtactcgtgtagggtcgtcatcgtttgcggcgtaccgcgcatgtgcatcaggatcacggacttaccgatccgcgctactgttggtagcatttctgggtcgaggaggccggctgaaatgtcgttgatgatgtctgcgccggcggcgcaggcggcttctgctacgctggcgcggtaggtgtcgatgctgatggcgatgttggcggcttctggaatggcggttcggatgtgcttgattgctggcactacgcgggcgatctcttcggcggcgccgactggttttgagcctgggcgggtgctctcaccgccgatgtcgattattgttgcgccggaggcgatgaagttgcgtactgtttctgttatgtagtttaggtcggttggggagtgcttgccgccgtcggagaaggagtctggcgttagattgaggattgccatgacgtgggtgctgcgcttgggatccgttgcgcgcaaggatgggaatagtggtgagattggggttgtcgacattggtgttggatctggcggcgagagagccttcagatgggtgctgtatgtttgcgtgtcctttcctggtagtggagggtattcatttgggattaatctaaattcagatggttagttttgcttattgtgtcggtatagcatatataaagccattgggagcgtactggctaagaggtcgcaatacaaagtctcgctcaagcatcagattgtgtgggatgttgagacgctcatgacagacgatctcctcatcatatagtaggatatccagatcaatagagcgtggacctttgtcgatgagcttctttctgcccatcgcaatctcaatagattgaatagtgtccaaaagatccaaaggtgcaagggttgtttccacctgatagaaattaacaatgggctaccagtttggacattactttcgctaacatacctcgcatacaccattgatgaaggtatcttgatcaagcacatacatcggtgcggtttcgaacaatgaacttgtccttttcactttgataccaactcggtccatttcaagacaagcctgctcaatcatttctactcggtctccgacattgcttcctagggcaataaaagcccggtggatgtctggactgggaaacttcaaattcatcctggagtcaactgcttgcgcagtggataaattcctcacaggcggggtcaaatgcaacgacgttattgaacgtcgtgatagaccatttctagtgagaattcccgatgccaattgggctgtatataccgattgagattgagaagttgaccctattgaatattagtgttgcaataaagtagagacatggcaaataaaaaaaatttgcggggacaggcatatttccccattgggacgatacgccgataagcgtgcgaggggcttttaagaagtagctagccacatacccaggctctgcggtgagggttttctgttactataagatgtcgtcagattcgccacagttaattggttatttggggctttaccctgtatgcaacggtctatgaccactcctggccggacctgcagccaatggcgaaagtcttagcgacctcccaatttgccgtgtatgaggaagaagagatgccaatggaggggctctctggattaccctggcattcatgctgatttgaaaaggaacgtagcaatacaaataatgtaggcaagggctttgagtcaattctggtaagtttcacgtggttcgccttcttcttggcgttgacgccgtgacgctttgacgtctggatgccttggtgccttaatacctatacaacatttctgattctccgaagtagatagctagctaggtggctttcgtggcatatataatgcgaattacgctcattcctcaccgtgaacatcacccatgaatatcaattgatcgaaatatctagtttaagtcctgcttgatgatgtccgccgccttctcagcaaccgcatacacagtcgcctggatattacctctcggctccaaggggaaaatactagcatcgacaacgcggatattagccgagccgtacactttcaggtgggaatccacaacaccgccatcttcttgtggcatcatcgcacagctaccgctgacatggaacatagacaagacgagctctgtgcacagctcctttgctttctcaagatccgtcagaggctccggtgtgtggaggcgttcgccacctttcttcagtagcgatgtcattggctccgtctcagcaatcttatccatccacatactatgcctagcatgcaactccagatcaaccgggtgacggagagttccatgatcaatgagaggagcagccttggggtcagaagattggatatggacggaccctcgtgatagagggtagctaagcagagaaacaagagtaataaagaaacccgggtgcccgagaccgaaaagacgtttgggggattctccttcccggggcaaaagctggaatggcgctagaataaattgagcattaggttcgtcgggattctggagtagggtgcgtaatgcttcatattgcttcttgtgtgtccgcgagatgtcgggactgtctatcgaagcttgcagcttctgtagcaattgagtccgctcgtcttcgggggtatctacaagtggcatgaatgcagagaccaggggcaccatgccaaggggtccggagccatccttctgataagcggccatggcagcacccgcaacggcagggtcccgagccatgtcgcctgacggcataccgtctgcgacttcatatccgaacgagacaataccgtggtcttgcatgttctcaccaacaccggggttgttgattattgtcgggatcccgtaggactggaggaggctttcatctccaacaccagatagctcgagaatttgagaggattgggttgttccggcagcaagaatgacttctttcgcgactgacacggtgtacacgtttgagtctttgctaaacaagacaccagtagcaatggcatcaccaccgttgcttcccttctctatgacaatcttttcaacccaggctccagttacaacgcggagattcgaccgagcttgcacctccggccccagatatgcagctgcagaatgacttctggtgtgtgtggcgggatcaatagaaccggggttcacgaagggaccggtaccggcgccattgatcgggtcatcggcctgcgggtacccaagatttttgaaggtgtccatccatgccgcatggtaaggcatgtactgatctccaaatgagacttgaacaggacccgtgctaccttgatcctgctggtcatatttcatccccttgaagaactcacggttgtcatctgatgggggtgctgctgtatgaaacttgcgaatatatggggctaggccatcccatccccagccggggttgcccaatgtttcccaggcattcaacccggaacgagagggatagatgaccattcccatattgattgctgaggagcctcctaaagtgcgacctttgctgcctaagagcttacggccattgagttgttcctatgttacatggataaggctaatggcaaactttatggggattgagtgaataatagtgtacctggggacacgatcgaaaattccaatcaaagtcctcgtcttcaagtgtcgccggccctaagccgggaatgatgattcgagggtcattgagacggtttgttccggcttccaggacgaggacgcggatattgggattttcagtgagtcgattggcgaccacgaggccagcagtacctcctccaataatcacaaagtcataagatgcgttctcaagacctgccgaggactcggtgtcgaaagttgccatggtcagttatgtaatgtaagtgaagcaagatctgaatgagagaaatacatctagaaatgagatgtatttggggattgctcttaggaggggtagacggattggggggctctcaattgagtggcgtccaactgttttaccttcattggaaaaaaatgtatttcgtagtacgtacgtacatgtgacgctgatagctcaggggaagtaatgtgatgtattgtactatggacagcagctggttaaggtagctactacatggtcacgtacgcccacgtaagagcaacagtacaatacaatcaacgaagcccctgaatctcttgtcgaaatgcgccccaagctaacagaatccaaccaatctaatcggagacttatgttgtatcgtagcaacgggatgggccgcgctatgccgaacgggagcagtgcagaccgagctagagctagcctgcatgtgaaacagaggcattgtattgcaattgacgggatatatttgccaagcctcggtaagaagacaacatccctgtcctttcgggatgaaacgtgcggggatgaaaggctaggcctaggtagtgcatattttgctgaattttctccaccggccttgtccaaaatatcaaatctcggattggtatgaatgtgatatttgacacatatgtacggagtgtacctcacccatttcgatgaggtttttcttccccaacttccggccaaggctgggctcgggcgggggccggtgcgggctcgtctccactttcctcccgaacgggattggttccaccgagccgatacgctagccgaaaataggttagcgtgtgtattaggtccgggcataatttacagcgtatcactactaagccacaataaaaacggcctagagagggtcatctgttctattccttgtctgggggtacccagcagccctgtgggttagcgtaggttcgcgtatattgattaggaaagtggatcttgatattaaatatttcttactcctcattttctaaatcttctaaatcgccatgcgacgttgacggtccgagtaacggtatcaaactgaaaaggaaagccacaatgggaaactatggactaaaatcggaggatggcagggaggtcgtgattgtgatgctggtctttggggtgatttccctgagttccacgattcttcggatcgtgtcccggagaatgagaagcatcagcttaggcttggatgattatttcatgattagtgcgacggtacgctcatcaaacagcctttctagcgtggcgtgagactgatgaagcctgcagattttggtaatggcgtgtactgtggttgtaatattgagtatgaaacccgtcggggaatggaacaagagacagcgctaacgggtatctcacgcagtggtgacaaagggaggagttgggctgcatgcaaacatgagagatgtcgcctttccagacatagaattcaatctcaaggtatgtgaatcacaacccttccaaccggtggatgaagctcaccaccgcgcggaaaagatgattatcgtctgccagattctctacgcaattggcctcgcgcttgtcaaaacatcaatgatgattctctatcacaagctctttggcaccaaagccagcatgcggattgccatttatgtcaccggtactatcgtgtgggcgtggggactgagtatcatcctcgaatcctttcttatttgtcaccccgtcgcctttaattggaacccgacgctacctaaaggcggatgtggaaatcgtaatgcagcctttgtggtagccggagtactcaacatggtgaccgatctcatggtcatgttacttccaatcccatatatttggaagctccagctacccgtgggccggaagattggtttatcggtagcattttccataggactgttgtaagtggatccgcgactgtgctctgatcttgattgcacgttcaatggctaaccttttgaaccacagtgtcagcgcaatcagtatggtccgcgttgacagtctcatgcgcatcgatttcaacgatctcacatatacccttcccattccgttaatgtggagtatcatcgaacagcaactcgccctcgtcgcggccaacctgcctcttctccgtagcgtgttctccgccgtgcttcctggtagttggctgggctcatcagctcgcaggactgggacaccatcgggggagcccagtgcgaagaagcgctcggcgcaggaatattctctcacgcgcatggatgctggtactaatcgaagtgaggtcacggcagacagccacaaacatgcgaatcacaattcccagacgaggtggagtgacgatgatgagcaatcggatacagagttggctgcgaatgcgatgccacctgatgggatccagatatggaaggcttttcgagttgactcgaccagagagaatgttatttgatgataatgataccaatgacatgtccctcgccacgataaacacagtctaatcataatggccacgaatcatgacggttttggggctatcacaataatgccttttttggctcgaaacatgagccctttaattatgagggagatatccatgaatactctaccatataaatgaaatgtttttcagattctggtgtcctttcagcccagggcttgtctcgtgactaagcatgcacctaggcgcgtgcatagccgcccttataatcctgacacgacaatataccagaaaaaggagctggtaacagggatcgttgacattgagaaaaagcttatgaaaataccatttgcttctgttggcagtgtctatttcaaaacggatctccctccccattcgcagggccaactatatcagccaggcacatccgacgaggaccgagactctgagacctactgtatcggacccaatgccgattacatgttttggtatggaaaacgcgcaaattttgacttggataggggaccatgtatattttctgctggagcaacatgatacataacgccaagctgaatatctcatagggagtgacctacggcaatatcttcttgcaattgccaacaaagaaatcaagtggaccgagcaattcgggaagccgcttgaagcggctttccacataacaccgtttttccgggagtcaactcccaccgagattacttggtgctccttaggaagtacatcgcaatgaaagatccccgagatattttgaatcgacctacccttcgccatcctggtttgtatacaacccttcaatcatcagactgataaaagctaagtacaacaatagacctcactcccagcaatgtctctgtgtgccccgacacattcaaggtcacatgcgtcatcgactggcagcatacagttattatcccattactccttgctgccggctatccgaggctatttgagaacccttcccccgagccccaataggcttagtcccgccaaaatatccagacggctatgatatcatgagtcctaatgataaagctcaagtcgacgagctcatccggcgggaatctctcttctatttataccgagttttcaatggaggactaaacaaagtgcatctcagagctctacagaatcctttgattctatcacgtcagcatctagtggattttgtgggccggcaatggtcgggcaatctcatgaccttgcgaggagctttaatgcgcatgcgtgacatatggccctatgtcccggggaatgacgacaactttgaatgtcctactacattttcagagcaggaattgaagagcagaccgagagaaagtcaacgtgggacaacttgaacatgcttgttgatcattggcgtgatgaactaggggagtctcagaggaaggctgggtccggaatgaccagtacgactatgctaccaaacggaaccagtccctcaaagcaaaattttcagaagatggcagtgcagacgagcttgagaacatcaagtgaggctggccttttcaggaccacgagttctttcaatcatcgtcgcataatgcttttttcaggctttgtaggcgcctggcggtcaagataaatgctatatatggcaaaacattcctccgaaaaaaaaagctgaagtccatatttctgcatggcgtagccatgtggcacctggcgctaatctgctagacctaattggtggctagtatatctatcatcgcatgcaggatacagggctacatcaaaatctatcctcttcaccaatcggcctcatgatcgatccatcgttcgttaccgagacgcctgtagatcttcttcaatatggcgtgcggtgggaccatgaggtgttgtcacaaaagaggagggaacagagtaccacaaagaccagctgcagccgaatgccggcaaaatctatcctcaatcaagcttggaagcaatgacgtgacaagaacggcgggactcgtcaactaaagcattacttcgtgcgagaccaagaagccctccgagcccgcttaattgcgcgattaatcctgtttgaaaagcccgccgaatcataatacaacctacagcttttctcgagaaagaagtaagcgatttacgcgccgacgagaagtagaagcgaagcggacttggtcgactaagcaggtaacccacgaacacggcaccacgaggatgtggaatatgtagggctctagggcatagaagtgggacatgtttagatgaattaatctaatttgattaattaattaattgtactttagttgagataaacgcatttaaatccaatcagtcgggttgggtgtgcaggaaatacgttgactagctaagatcgagataaaaagggagcttaaacggtccaagacaactacaacatagatacgcatttcaacagccgacttatcttcagttagttttgtgttgtaaaacatccgattggcgtttcctcatcgtctcctcagttggcgcaatagctgccagagctgctcttcagcacgcaatcacagtctccggtgacatcttgatcttggcctatcgccaactagatttttcggccgatcaccgaggctatgtaattagttggagtctgctatataagtttctccaaatcctgtttgttgggtatacacaaatatgacagtcccccaacaacggcggaaatggtggaaggtgcaatggtttgcagaccaggacactccagaggagagacggctcattaccaaactcgacttgctgattgtcccttatgcgttcctcgcatactggactaaatacattgaccaggcaaacataagtaagaaatcctccgacgggatatcaagtatgttaggtcaattctgacaacaaccagataatgcctacgtctccggcctcaaagatgacctaggtctacacggaaatgagcttgtacagctgcaaacaatgtatactattggagcagtggtcggacaactgcccttcattttcctatttaccaagctcccaatgtcttggatgattccgtgtatggatgttatgtggggaatcttcacgttgttgcagtaccgggcgaactcttatgcagagatggcagcctatcgctttttcgtgggctggtttgaagtaagtatagagaggtctgattgactgaatgagagtactgacattagccaggcgggtttcttcccggcaatgcattacacttttggtaggcataacctaatctccttgtcagaagatccatcactaattgacaataggttcatggtatcgcggcgatgaaatcgcccgccgcggaggattcttttacgtcggcctgaccttcggcacattaacagcaagtctgattcaagcgggcgcctcaactcgactggacggcgtcaatggactcgccgggtggcgatggatgtacattatctgcgcaatcatcaccctcccaatcgcaattctcggctacttcgtcctccccggatcacccgacaggccgaacaaattggtgttgaaagaaaaagatgtacagatagccaaagcccgactggcacgagtggcgcacgagacaaaagaaagcagtctctcttggcggtcggtactaagggtcgccagcaactggaagttctgggctctacttttactggatgtgcttttctggaatgggtctataaataccactgccggtggataccagctgtggctcaagagcctggaccgataccctaccggccgcttgaatgagctagctgctatttcccctggcttgggtatcttttacacgctcttcatttgcttctcgtcggatctattctttggacctgcttgggcgattacagtgtcccatatatggaacattatcggactgatcattcttgttgtctgggacgtctctgagtcgacgctatggttcgcgttcctgactacttactctgctgtcgccatgtcgagcgttctttacggttgggttaacagtcagctacgagcttctccggttgaacgcgccctaactctcatcatcatcaataccgtctcccagtcaaccacagcatggactcctcttttagttttcaagaccgttgaggcgccgcgattcaccaagggatactcatttgtcctcggaaatgccatctgcttgattttgctcgcccatgtgatccaattctttatttcacgagaagagtaagtcatccccctaaccaccaagtcaaggatctctaataaatttgttacaggaagcttaaatcgagtcgggggagcgtatccggttcagaaagcgcagatgtttcgagctatctcgaggccaatgttcaaagcgagggtgtacaggggaaagttgatacacagtcataatgcagcacttgatagcattcataaatagactttaggtaaacattacgttggaactatacaacttgattagatcactgtcatgaaaactccctgccattggcgtaaaaccagacatgattttctgtataataacagtacgggataaacacaagtcggctgtaaaacgcatgaaacaagatattaaacgacatcataagaaacccaccgcagaattctcattctcataaaaattgggttgatttacgtctcgtttgcagaagtcgatgttgtgctttatgcgtcctaattaacatacgcaactaaacatagtggtgtgccactggtgtcattcaaaagctgataaatgccaagagatatttaacccacagttctacctgaggcaccaattatatgcaaaccttgcaaacttttcaggggactttttttcaaggtcacgtgtaccccatctgtaatttctaaagccattgatccaactccgagctacaccttatctcgtgtcaccgctgggtttattgccattcctaaatcctcgacgtttacgactctcacgcctttcgcatctgatctcgtcccggtgatccgccttttcttcccaactttccgcccgtccgcctcattcacacatcatggatcacacacgcgatccctgtccctgggttgccctgagcgatttcggaggtgccttcgccatgggtgccatcggtggtgctgtctggcacggtgttaagggattccgcaatagtccgtacggcgagcgccggataggtgcgctctcagcaatcaaagcgcgcgctcccgtcctcggtggtaacttcggctgctggggaggtctcttcagtatttacgactgttcaattaagggtatccgcaagaaggaagatccctataatgcaatcattgctggtttctttaccggtggctccctcgccatccgtggtggtttcaaggccgcccgaaactccgctattatgtgtgccgtcttcctcgctgtcatcgagggtgtcggtattggtttccagcgcatgatggccgataacacgaagctcgaggtatgtggaatcttatcgccttcgattgtgcaattagacgtgtctgctaaccatgaaaattattagcttcctcccatgcctccgtcggagcagaaggccctcgcttgaataccctcctctcggtccatatcttccttcgatcgtcgtcaaaatatcctcctttctacccctgtcttcataaacatcaagtctctcttctcaggcgttcggtcgatgtcattattcctatacaacatagcacagaggctcccgtttggttcctactttccccctcgcttttaatgccgctttctacggcttgtgtcgaagcattgtacattaaacatggcgaattcattctcatggatggttttaagaccggtgcatgtcttttcatggcagcgtgcttaaaccacaagattcataacatttgttttcttcttcctttagataatttgtgaaatagacgaccaaagccgcgtatcgtacgggatcctgctaataactcgtggactgaaagtgtcacagatagcaattcagagtctacatcgggcagctttcaatcgctacgatgtaaatcggatgccgactgtatagcctatgggcctttctcgacgatccgtctgcctttacccttaggaaaccctcacataaggtcacacttgcccgagcaaactaaggaccttcattgagactattactgtggacatacaagatatttcatagtatgtatatctttttcttttttttttttttttgtatatatacacgccagcggccttccagagcttgccccagaccccactatccgcaccccaacaagacgcgatggccacttcgcacctttctactacgtatctaaaatccctaacacgccaacattctgccttacccgcgatgacaacaccagtcgccctaacacaaccaatccccggggaccgagatgactatatctatgtctacttcgggtgtaacattatactacgggacgcaactcgttatttcgataggattgcatatataggtccagggcgctgggtcggatgccaatatgcggtagacggcggatttcttataaacacataacatgccgaatgtcataataataaaagatatacggagtcgccggatgtacggcaaggttaacagaagcaaagaatgaaaaggaaatagtaaattaggattcaatagttataccataagaagtagtactctcatactttcgtcccgtctcattggtctaacaccctattcgctccactatccgcacctaagtacatcctccatggagccagtcagctttgcagtcggaattaagggttagtaggtctttctagtacttgcttgaggccgttgaaatgttcgacccgtggagtgactacgattcccaatttcgttctctgttagtcatctaaagcccaaaatcttcgactcacatagcgggtttagctgcatggaagatggcaaactctcatatacaaacgacctataggagatattctccgaaaggaaaatcgaaagcacttggagtaggtttggggtcatccctagttattggactttccaactggatgtgctaaggtcctccaggatccaaatcaatcatatgtgcgggagtcattgaccatatttctccaattcggtgcatattccttttcagatctttgccactgcttttgagccgagccggatgattacacaggagaatcagccagacgttggaggttcaagacgaggcttaccaagaagccagaggtatgatgtagattctgttataccgtaccttgaattttgtgtgtgttcctgtgatcaagtgctcttgaagaggcaacgaaaagtcaatttggtttttctttttccttttcttctttttttttcttcttttcttcttcttttccccttctaacgcagccagagaatgtgtattcctggttttggtagatttagccacaggtacatgctgccaaagagagggaaaccacaggcacattctgtgaggggtagaaccaggaaaggcaggagaggcgagagttaaacatatgatccgatatatccgagttgaccgaaggaggcgaagtactcaaccgcttgatactattgaacatgactcagcaagaatcacgcgctggctaataatttgtcgaatgacaagtcccacagaatatcgtggcaaaaagtgtggctgagttggtggattataggaacccacttggagccttgaatggatataatataggatttttggtttaaagtccgcgtgttgaactacaacatgtaagagtatcttaccgagaagttatttgaggtcttctatagtagatagcatccagaagacatattatgtataatgaacatttgaataatcggctgctttcggtaattttaccgtgcctaggaaatattgccacaggaagctgacgagaatgtaagtctatcaaactgccgggcagctgcgaaccacggtggacaatctcagaagccatgcgaactgatgtcagatccgttttttccctctctctggtgtgtttcggaagggcatcaaccttggaaagtgcaaggtggtcgaatttcgaaccaaacccgttgaatgcttggatcaatctgagtttaaagaatcgaaagctgacaaagtgttcgagacgcatgtggaagcctcagccgcatgctatgattggctaccggttctcggaagccaaccttattgatcgaaccccacatctatagaattgtagtctatccacactctatccacactcccaccttttggttcctcttggaaagttctcctcatccggagcgactccaccaagcaagcatagaaaagatggccctctgcagacatgatccccttttctttctttcttcaaacacattctttgatccttcaagtcactctcttcttgaagtcattcattctttcgaggttgatcctccattactgtcactttagtatctctgtaaatcaggtgaacttttgtcccacttccactccctcaatttacaatcttccatcatgactttcaacgtcttccttaccggccttctcgctgccaccgctgctgccgtccctctttccgctcgttccggagaatccggtgccgttcagacccgtgattctggcggcggcggccttcagatcgtgaacaacatgggcaaagatctctacctatggaccacctcgtccgatgctggctccatgcagaccatcagctctggaggtgaccacagcgaggactggaccacgaactccaacggcggcggtatctccatcaagttgtccaccagcgagaccaaggatagcgtccttcagttcgaatacacccagaatggcgataccctcttctgggacatgtcctccatcgatctcgacgcgagctccgactttgtcaaggcgggcttcaccgttgtgcccagtgactcgagctgcaagacggtttcttgtgccgctggcgatgcggactgcaaggatgcttatcagctccccgacgacgtgaacacctactcgtgctctctgagcgccgatttcactcttactctgggataaattttttttcttttcttaaaaccggcagggccgatggaattttggggtttttttggattttttttttagattgcagaacataacttcctccttgggttgttgatagactcttggatatgtatttacttctggagtcgatgtttactatttagcagtgagcttatcaagtatcactagcacaatataagaatgtgttgaaaaagatctcatgtccaactatcaagatgtaagtgtaacgctatgttcgtataattggttttgcttcaagcatatactagggacttgctattctcctgtccaggagagatgtcttctccctcctctctccagccgcagacaggtcacagatcatcccactttcgatccaccatcagtcatcgacagacatagacaaacatggcctattattctcttaagcaatcattgaggtcaatttcaccatgacatattacccctttatcccagtcaaccaaggggtaaagtgcccctcatggtggaattgactccagtgattgcccaagaaaagaaaaagaggatatggctaaagtccgtcgacaaatgatggcggatcaaaagcggaggagcatcatatgcttatgtacctgtctgcagaggggagaaggggagaagatgccaacacacgtatgtttcatattgggctggcccagttcttggcagacacgtgaaggtctccgcctcaggtgtcaacgaaccccgcaacgtaacgtggtgactaatctcggccaagtcgtgtaggccgaggctcatttcgagtctgtgaccaccgaggttgctttgctttataggttggtcgcaccccgtctgaaccttctcttccccaggttttcttcttccattgcctgcaccccacatatcttcataatggcttctcctcgtaagtgttctatatcccctatgtttactctgcaccttatttccatgtgatcctctgcatggctccatgtgggcccatactttcaacagtgttaaccgggaccgttgaacagaacaaatccgtaccccgatcactgatctgctcaagatcaaccaccccatcctgctggcaggcatgaacgtggctgcggggcccaagctggccgccgctgtcaccaacgccggtggtctgggtgtgatcggcggtgttggctactcccccgagatgctacgcgaacaaatcgccgaactcaagagctaccttaacgacaagaacgctcccttcggtgtcgacctcctccttccccaggttggcggtagtgcccgcaagaccaagtaagaaccttcgctgcggtacttttccgttgttgacacgtgctaatcgcgttttgtttcggcaaatagctacgactacaccaagggcaagctcggtgagctcgttgatattatcatccaggagaaggctagccttttcgtctccgccgtcggcgtcccccccaaggctgttgtcgacaagctccacagtgccggcatcctctgcatgaacatgatcggccaccccaagcacgtccagaaggccctggatgttggtattgatattatctgcgcacagggtggtgagggcggtggtcacaccggtgatgtccctaccaccatcctcatccccaccgttgccaagttggtcgagggcaagaagagccctctgaccggccagcccgtgcaagtcatcgcggccggcggtctgttcaacggtaactcggttgctgctgctctgatgctgggtgcctccgctgtctggatcggtacccgcttcatcctggctgatgaggctggcgcccccgccgctcaccaggaggccgtccgcacttccaacttcgaggacaacattcgtaccattatcttcactgtatgtatcaccagcgatgttattttcaaggcgtccatgttgctaacaaccgatatagggacgtcccctccgtgttcgcaagaacccttacatcgtcaactgggaggagaaccgtcacgatgagatcaaggagctcacctccaagggtatcatccctgtcgagcacgatatggagaacttgcccgatgatgtcgatgacgagactttggacaatgcccgtccttggctgatgggcaaggttgccgccgttgtcaacgagaagaagcctgccaaggctatcgttgacgagctcgtcagcgatgccgctgtcctgctccagaagggcaacaagatggttgctaagctgtaaataattattccctatattctcgatctctatagtcatgttcagcgttggataataaaacttgaccggtgatattcccggccgacctttggaacttacctgaattttgctcgatgtacttggacgtcacccgatgtctaatgtaggttagcgttgtatgatcccctctccaggccgctatggaattatccctgctctttcccaaaccttccttgatccaaaaaaagctcttaagcgcctgggtggggtatcaactatcaatcaccctagttactccgtattccacgtggaaatcacatccataatcgttatgtaccggcattagttagtcaattatgatataaatagattgtctatccttatatttctcattttgcttcccgtgtcccgtgtctacatgatcggtgcttttgctcgctttccttgtgttgagaccactccaagcttggtatatctcattccgtctgtaatattcattaaatctcaactcggatcgtcctctcgctgcaaaatactcctagaaactgagtatccgttccacaatctagacaaacagccgaggtccgcacgctccattgtgttctcgatcggcacccgagcgcattagacactactgcacctataggcagggttaatccgtaagagtaaatacacacatatatggagctgcaacgcaaggtacacagaaatcccagttggttcaatccgtgtgcaggtggacctagtgggtctgacagggtgtttgtagccgtattaggcttagctcctgagactaggtatgggatgctccgagccaaaagaatctcggatttcttggtgtatcatgtatggatgttacaattacctggctgatcagctagaagtcggctcggtcaggtggaacagtttgataatcggaggtctaacggccgagagattagccaagcataggaaacatttagcaattacatgcgacataccgagtacataagaccagcacggagctcattcagagcagtggatacgttcctgggaattggtctgtgagtccaatggaaagtgaagtggagatttcaatggctaaatataaaagtcagtgcagtcggtaccattgagcaaagggaggtccgtggtatgacgtcctgggaggcgttcgctagatcgtacggaaagaacatccgtgatttgagtctttaaccttttcaatcaccgtgctttatggtcccacatgatgtgatgttttctgtacgtgttgcagctgtgccgtcttaggccctacaacggtggctgaatacggagagtttttggccaatgaggcatggatataccagtgtttttgctggatgcttctaggtcacttgaattgggattgaggcgtcgaattcgaaagctgcttgccaatcttcggtgactcgaacgcaccatagaaatgttttccggcgtttgacgcggtgtcggccggaaagccacagagactaacaatatctagattttcatgttccatcgttaatcattctctgtgtatgcgcattagtatggtctatcaatccatggatgtctggtaagcgggtcgggccggtcccatggtgaaccatcaaagacttagacagccagctgtaaattgtattcatgttgaagttggagataattccatagacaccaattgatcgaaatgatttctcaccgttggctgatgtgggccgactcggtatgggccatcggccgttcttacccgagtacacaccgattgggacttggcgaggagataatgaaaagggacagtcttggaagtcagtttcttgtgtaacacccccaattgaacggaacacagtcaaatatcgtgagcactagagcggaaagggaaaggccgtgaagtgtatatatagccttgtggagggatcatcggcgccagggaccttgaccagaactatatacggagcaactcactatctcgaagaatcgactccgtccttcgctttcagacatccgtagcgagaggttgggtgtcgataccctcgggccctgttcaactctaaataaagcactgcaagcgccgtggcggggaatgaattgaagtgaccagggggccgaggaccaatgaaccatgaattctcccacgcgatagaccggattcaaatcccaagggaatatccccgcactgtccagacgcggccggtgttcaattatagagtcgaatgaaagtcaaagcacgtcgggagtcaaagcccatggactattggccgaagtgagaaggtaggttggctgtcactgatcacaatacgatgccatgtcggaaatccgcccactcataggctcggcagtacgaaaacgcttgtgtgggctcctattgaccgaggcgtgcataattgctgcagcaaagcgggttatttttggcccatcacctcgcttttttctgtcgaagtagcctttccaggactcgcatcttttcccctgcccctccgtgcagcgctctctgcaggttctctaagattcgggcttttctttgcttttttgggattttcgatttttctctgcaattcgtcttttcttttcttttttctttttccgcttcattttttcccccttatcccgctaaccctccaattcttctgggatccaagtcgctgggacgccccctcatctccactcaaccccgtcggaggttaagccaattagtttcgcaatcgcatctgatagcactctacagtgattatctataaatacattgcaactgatatccagcctttgcacgtcaatctcgggatatcacattacctcacgggattattcgcctggagccaatcctctccccgcagctcgtcccatcgcactgttcttggcccctctatcacctccaaggtttttttcgtcacaccgactgagcccttggccattggcgcgattatattacttgcgctttcccggctttgcgctggaaggtgagcccacaaagtggcggaacccgagactattatcgtgccctagttggatggaaagtacttgcaaagtctttcaatctatatcatctaggcacactttgcagattccgggacaatgtcgctcaagcaagtatgtatatcggtgatctcggaacataaccatgctgatactgtgatcaataaggaaatcgaaacatgggtgcaggcccttgaggcctatgacaatcaggaatttgaagagtccctgcgatgcttctatatgatttccgatacatcaaagatcttgtttaactgtggagtgatctacgcaacgctaggcgaccatcataaagcagtaagtgatcccatgagaggttttcccgacagtaactgatttggtgcaggtagaatgctatcaacgtgctgtcggcctagaccggtatctggcaatcgcttacttccagcaaggtgtatctaatttcttgctcggagacttcgaagaagcgttggccaactttaatgacactttgctgtatctgcgaggaaatacttctatcgactatgaacagttaggtcttctattccgcctgttctcatgcgaagtcctgttcaatcggggtctatgctatatctatctccgccaaatgaacccaggcatccaggacctggagtatgcagccaaggaaaaggttactccagaccacgatgtgattgacgatgccattcgcgagaatgcagatgtatgttactctactaaattgctggatacaagctaattcaaatacagggctataccgtcttctcaattccagtgggagtcctctaccgtcccaacgcagccaaagtcaagaatctcaagacaaaagactacctaggcaaggctcgactagttgcggcgtcggaccgcaaccaatcatcagatcaccaatggaatccaatagtcattaaagaagccctccaaagccgcgaaaaagtccccttcgccacatccaacctggtacgccacaatctcagcagccgtactcgtcaacaatccgaaccacccctaagccgcaacgtattccctccaacaccgccaccagacgaccgatcagccagcacagcatcgggggtatccggacaccaccgatcatcatcactgcgaaatgtccgtccaccacgtctggacctagaccgcacaggtgccagcctagaccgccgacccaactcacaagaacaggcctccaccgagagaccacggataggaacgacgcgcacagcctccgagccgcgcgggccctcctcccgccaaaacgtgcgcggctacccacaggaaagccgaagcagcatggcccgcgagcaagccggccaccgcagaaacctcagcgacacaaacccttccttccaaccggaatccgagtacggcaccagcgaccagcacgacccgcactcaagccagcgcaacctagcccacgcaggctggggccgcgggtcccgccaccaaccaccgcaatacatcgacgaagaggaagaatacggcagcgacacatgcgacgcaacaaccctccacgacggcggcttcgagctcgtcggtgcgacccctggtccaagccagcaacgccgcacccgctctccggcgcgatactcccgccatgcgaacccgcgcaggcccgagattcagaaattcaggacgaaagtccacgccccggatgatactaggtatatcatgatcgggccggagatcgagttcggggaattcgaaaagcgcgtgcgggagaagttcggcttcaggtgtcctttgaagatgaaggtgcaggatgacggggacatgattaccatggtggaccaggaagatttggatttgctggttagttcggcgaaggaggttgctcggcgggaggggagtgagatggggaagatcgaggtgagtctatctgcactttatgaatctttgaaacatgcatatcctgactggtttcatcgtttagatatgggtcgaagagcgctcaatgatttgatgcatgattggaatttcttctctgttgatattagcatcgtgattttgtctataccctttttttacgtatttagcatgaaaatacgaccaatgcatgagagatagtgatgtaattctctttcaatcgagctcgaacttaaggaaattcgttgacggaaacataagattggagatgtcattggcatttgccctggtggcaacggaaaaacttgattcttggactggcacttttaaaacaacatggtccgcttcgcagtacaggtttcgagcgaatgtcttcgttgcttccgcatgtcttgctcgttttccaacagtctctcctgcacatagcggcttccgctggggtcgtgcttcactcgctcgtcgttgaggatgtttgtgagcgttgctttgacttggcattggtagtcgcggatttgggcattggtggcatcggtggcatcggtgatattgccaaagatgatcgacacctgggagtctttttcgcgaagtatggagtctggggtaattgacctcgtgatggcgggggttgggtttagggtagacagcttggatgctgctaggttgttgtttggaggtggcgccattttgcaggttcatatgatagattggtattgatgaattgatgaatagatggaatttttggaactggtattagaaaaggagatgaagttgcttttaaaaattaatacaggcaagcccccaaactgtgtcaaaggtgacctgacgtctggcggcatatccgaaacctgcctgattgccataaaacgatgtgtttgaacatacgggtatgacatggcgggttccacgaatcagaggctagtgtatgcttggcctttgtgaagatcgtatgaccaagtagtcctagcgtgcagcgttgtcgccactggtggacgtgccgatgacaactacaatacgcaagatgctatatcagattttagttttgtgcttataattccctatcctggtcattcttatgatatactattgactttcctcaatgatctagaatcaaccggtcaagtatagtgatgtgcgttgtgtgcgtttatggagttcaggcgcgtaaggaactactccgtaggcgataatggattcattgctaaggcgctagatcggataccgaaatcacccgtgtctctcaatctcctattcagcatcggtctttgtctgtccagtctctttctcctcggtttcaaactcggctgtacctccaatccaacagccactggcattgccacccccaagcctgaacctcaaattaatctcacggtaacggtcgttgtcgcaaggctccctgatctgaagtggctcaacaggtctgtcgacaaagccatttatcaaaagcgcaaaagccaaagcagtcgtggtgtcctcccaattcgcatcgggttcaggaacctgtctcacttcgtactcctgccgtatttcgtcgacgatggcatacagacacaatccagggctctgaatcctttcaagaagcttcttgacgagatcatcgtccagcttcaagtcacgcaatctcctaaccgatctgatcggaatcagtgtcgttgagattatgtccgtgtcagcatcgtcgaccgtgccagcattgtggaccattccaggtgcaatgtcagatctcgaaatcttcaaatcggacagaatgacatccatgttttcggtattcacagtgttcatgtcacatgccaggttgaagaactcaacccagatgttctccttggcgttgtctttgtcggtggtcttcgtgatctttgcttccacacagtcgctcttggtcaagatgcggaggtcgccccgcggcatcatcccaagcttcgagagtagccacacagttccgatcattacatgagcacacttctctagttcatggtctgggtgccagacgcggatctcatagtccaagtcggagtctgctggtgcggagaagacgaacccgctcgggtggccgtaatttgtggtaaggttttgcatttcttcgtcggacaggccattggcatttaggacaactgaaattatacccttgccgtctggacctgcaggagagacccgtagaatgtgggcttggacattctctattacagatggatgtggtagagatgatgtcgcctccattgtagatggattgatgtagtggttagatgggtgagacggttttgtgtagacgcgataccactcgcgaagtgatacggtacatggtgaagagtaagagaagcaagtactaaagacaattcaatacggagtatagtaggtggtattcctctgttccaaatacggcgtaccccgtatgtataaacaaatacagcacgcgggatagaccactcgcgcagtgacgttgaatgttgatcgacaagtgtacagttgtatagcaacaacacatttcaaaccatgccactcccacaatgaccgacctaacaccaactctcaacaagctgctctcaaagcaaagctcaccactcccacaaaccaaaccctgcacagaaaccgccgacgagttcctaaaggaggcataccgaattgtaagccaccctcactaacactataccaaaagcaaaccagaaaacaaaacctaacaaaaagcaccacccagaactcccacatccactctctcctccaatacctccaatcaatccgccacgcctacctctcaacaacacaaccacaccgccgcaacccaaccccaaacaccaacccaaacaccaaccccaaaaatgcaaccccaaccccctcaacaaacctcacagatcccgaacgtgacgcagtcgacacatcaacagccctcctcctccgcgacctagcaacctcaatcgcaaacctctcctccgccgaaaccctccgccaagaaacctcacagaccctcctgcacaagaaatacggacactcggccgccggcgcactcctctggcgctgggccgggggaagcggcgcgctagacagcgccagcgacgagggcaagtccgccgagcaggtgcgtgccgaggagagcgcgcggttgatagcgacgatccgcgagagcgtgctttggttcctgcggcgcgggctggagtgcgctgtcggtgtgcagcggcggatggtcgagaagaggattgagagggtgcgggagaaggagaagagcgtgctttacaaggttggtgcgggtggggttaggaaggggtctgtttctggttctatggatagggctggggctggagctggggctggggctggaggtcggggcgcgggttcgttcgatcctatgtcccaggcgcctgatgcggcggttctgagtgaggcggacacggcgcggatcgaggcgcagctttcgccggagcagttgcagctttttgcggaggagaatgattctatgcttaagcattatgaggatacgttggggaaggtccagtatgtttctttttccttttccttttcttatatgttatgctgggtttttgttgcataatgctaaccatgccctctttagaaacgctgagaaatctctcctggagatctcctctttgcaggaaacgcttgtctcgcatcttgctacacaggaggagcatatttcccagcttgtcgcggacgtggatacgacgcatacgaatgtcgggcagggaaatcgggagttgaagcgtgctaccgagcgacggagtacggctcaggctgttttctggggtactgtcgggctgtgtacctggcttgtggtctgggatttggtcttctagtctggtgctactgaaggatttgtcggaagctttggagagctgttttataccatacataccattatgtctatttcattgaagtgtagcattttatctcaagatctctcggggaggacgtgattgttattgtgtctgtctaactgttgagtgtatacttcccaaagaccttactgttgacggcccggtctagctaaatgaatcgagattcatccgcggactagcgtaatgcacagaccattggataaaataaccctacgttgtataacaatccaatgccgcatgctatatctatcatttaaatgatggatatgataacgcaaggaacgagaaatgcaaatccagaccgaagtccagagtactatggtaaattgatgcatcaaatgaaagtccttccgaactttaaagaaaaagctcacgttcaaaaaggatagaattaaagaaaaacgccagaccaagtctcctcgagtgtttccactatgtcaagaccggggtatcaggggtatgagggaagtatcacaaagcagactcgcgaacaacactatcaaccgcctccgcgaagtagtcgatgttattcgagttcaagccggccattgagatgcggccgttctttgtctgcgagtagaagaagagttaggaattgtgattccagacgatgtaacactgggaaaggagggagaaaaacataccatgtagatgtgccacttcgagcgcaacgttaagacctgctccactgagagacccgtgaaactgaacatcccaatctgcgaggtaatatgatcccacgaaccaggcgtaccaagcttctcaagacgatcccgtaacccttgtctcatatccaggatccgcccactcatcgtgcgcagatctgcctcccattccttaaagagaacagggtcattgagcacgcgactagcaatgcgcgcaccgtaagcaggagggtttgagatctccgagcgctgcaggatagccagttgggaggcgatgtgagaggaggcagccgcggcgtccggaccgggcgcggagacgaagtggaaggcgccggtgcgctcgccgtagagaccgaagttcttggcgaaggactgcgcgacgcacagctcgaagccttgctcgacgaagtagcggatggaccaggagtcgcggaccaggtcgccggatgcgaagccttggtaagcggtgtcgaagaaggggaagtgcgaacgcgagcgcatgaccgcggcgatctgcttccattgttcttgggtggggtcgacgcctgttgggttgtgcgcgcaggcgtgtagaacgactacggagccgtggggtgcttcttccaatgctgcgatcatgccggtgaagtcaaggccttttgtcttggcgtcaaagtagggataatgggcaagcggtaggccgacgtttgtaaagatttggttgtggttcgcccatgttgggtttgagaggtagactgtgggcttgtgggggtggaacctggcgaggaagaggccgcctagatggacggcgccggtgccagagatggtctgcaacgtgcaaatctagggcggggttagtttggaggtttggaaatattggagtaaacagctacatactcggttttcacgaatggcagggctgtctgcgccgacgatgagtttctgagctgcagaggtgaagtcggcgagaccaccaatggagagatattcgtggttgagagtaggatcgttgtggatagcgtcatcggcctgtcgaagtatgtcagatcactgcggggacagaagtatagagatagatatagatgtagatagttagtaccttcttgacgaccgggagaacccagggctttgcgttatcgtcacggtaggcaccaatacccagatcgaccttgttaggtgaggggtcttctcgaaaggccttcataagaccaaacaagggatcctcgggtgcggcagcgacaagagccgccgtaaatactgatggattggatgagcccatgatgtgtgatgttagagaggaaagacgctcccttgcaatctggagcgaagtcatggtgaaattatataatcaaaaataccccaggtggtacaaaggtattccccggaatcaccgaaacgggatattcctgcttgcgttcaccggactggagtgagggggtggggttggctcgggggaatcagcgcgcgtcgtttgctaagcagaagaaaaaatagtatacagctgtaaggtgtacggagtacgttggtatcgtctttcattcttatattctatctcgctgcccctatcatatcctcggcgcacaagataccgagggagaacatgccgtatctttctcgttttgatggtcacatgccagtatatcgccagtgggactatgcttgattattataggaacacaaacgtacggacataaacacctgatggaaatctcaaacacattccctgcctccgacaggctgcacgcgccgattacaaacagtgtgtcatacaacgccgacgaaaaaaagacgcactgtggagacctttctggcagctaggatcgttgcatgataggtctctcagggggttgtattttatatgtctcaatggcctattaactcggtgggtatttagataactgcaggtataggcaatacctcgcaggatcggactttgaatatgaaacagttctcgcaattctagaggctccataattataaatccatgtggtatgtgtcattcccccacactcgtgaggggactaaaataactcatgaggagcatcccgggaccgagtctccgaagaagatttggggatagggcggacttgctccgattcttccccacagagaaatgatgatattgtttgtacagagatagagagtagtaagatcatataacgaatgtaataggatatatacagtacaatctaaaatatacgctgtaacacggcctaattgaaatgataacagaccattactccaaatacgcaaaacggggtatagatggtgtacggaaaccagattttgagtcagccgctgacgtaatcatcagccaatcggtcagacggtcgtgcctggcgatctcaacatcatgaggtgggtactttggcaaaggtactgaatctgatattctgatattgaagctatccggtacttatgtgctccctgtgacctggcacagcctcaaattattcaagtctacggtgtagggagaatctgatatcagataattcgatctgagtctagatctctgtccgcgtgatcgagatatgtcgatcccatctctatctctatctcaagataaatccaactgaaatgtacgtgaccctaaattcatgatatacaaaaagtatatacagagaagagatacaaataaattactgagaaaccagtctctcttttccaaccgtcacaaaacgccaatgctcaaacaatccaatggacaagaaataaaaaccaacccattgaaaaataacgccagcctcctatcgaagacctgaaatcatcggaatcataaatcgaaaatatatgcacgtaaaggagtaaaatcatcatgcagtagacggcgtgagatggacggtcgctggagccgccggagaaggcgcagtgtcggcgtccgcgggtgtctcagcctcagcaccgtgggcgcgggttcggatgcggaagcgatcgcggagtcgggtagtcaggccacggtgtgcttctccttcgggcgcaggttccccttggcttgcttcgcggacgtgtcggagcgcggcgagacgctcctcgacggtggcatcgcgcattcgtcgggcgttgagggggccgtggaggtagttggtgagacgacggtgagtatggcggtgggcttcttccgctgtttggtttggtccgccttctgcgggttgaccgggttggtcgacgttctcttcctctggattctcgggttggggtgggttcaggtcgatgcggctgtgattggttagtttgggtgttgatagttgataagttatcatatcgacataccagagtggacatgtgccggacacgttcattaaccacgggtcaatgcattccacgtggaattggtgattacaaggtagtacacgtaggtcttggcccttgacaaagtcatccgtgcaaatgggacacgagaagttacctccgtcatgcacctcggtcttggcttcgggggctgtgggggtggggcgctcattatcgtctggggttggcatttcggattcgtggagggtcgatatctccgtgtgaccatcggcctgaggctcggagtgctcgcgatcctcagggcttatggtcatctcgacatctcttttggccgcctcgacgtcatcatttttttcatcaaacttgacgaccggtatcgtgtctaacatggctcgagctatacctcgggctcgactttgccggactcgcccggcaatccggcgagggccgtatcgctcggggtggcgatgagcacggactgcacccgtgataatgatgcccaggaacagggccgtgatgataccggtgatgctgtacaggatgatcatcgctggaaaaagtcaacaaaccgagcaggatagaagaagtcgggatacaaaccagtgttcgggctgtcgcccgtaccaccggaatcactgtcagatgggacaccagagaggtacgacattgagacgatgctgatcgttgttgtgttatcgaaagcacggagtagtgcagagtagccgccttggctggtgaaagtaaagatgttgggataccggttagcaatcggatcattggaggtgagattgcagccgatagctgttttgctgtatagtagaatggcagcggatccagaggtgacgtattcaattgtctggccaacgcggatattcccggtatactcgtcctggtcgcaagatatgaaagcgatctgcgagctcttcaagtcgagcgaattgctggggatgactcgagtgacaacgccggacacattaaaggcctgaagtagtcagtggtgcccccacggacgataagagcgtatggcaccttgagtttgtcgtcggttgattgaatcagcgagttggttaaggggaccagattctgaccagtcagagtgcttccctcaatgcgaaacccggtggattggatccggacggtggtatttgatggtagcgaaacaacctcagcctggactgagaagaacaggagaaagaaaagaaacagtcccattgcgggagacggcggaatggaagaataaatgtgtggggtcacattagtcaagtggatggtgccctggtggatgagcgttgcataaaaaaaagagagcgaaactgggaaaaccagaaaatgaggggagagatcggccctaagagggccctaagaggatccaagcggataagagagattaggcgattgatttcggttattacatattatgttgttatagattgctttatcttgtagttatatatgttggagttatgttgtaggtttagggtacataactatgtcaggataacgtggttaaaatggttaacatggttaacaagggcatcctcactaccacatatacagcagaataatcattgacgatcacacttggaaacgtcatcgctggacttaccctaactacatctgcacagggcgatctttcgatgtaaatcagcatcatcgctctcgtattcgctgtcctcgcccaacttgcccagttagtgtgattaatattccggacttccgatcactgtctcagttcttctcttttaattttctgcacgttctatcttcagacccaaggcatttagcctgatcattccctggtctcaatgtggttttgatatgggatgatcctaatctgacatgcttactcgacttccaaggttcttcagctcaggattattgttccacgatcaacgctaccccgcagatacctattgaaatcaatgcaccccatgttatttgacccaccgagggaaagagagagtagaaaataagtaaagaggggtgaattgtcgaatagaccacacattagtactaagtgcatggatgtccagtctagtctcttccgaatatcaaatccggagagcgaacgggaagagaggtttaaagtatagtcctagcaccggattaagtctccgctttcttggtatgatctgatatgtaactacctatatatacttggacttatatatatcctatcgtatgagtgccttgaccctacataccatacagtccttcctcacccaaataaatacgaattcctcctgagtggcgagagtagggcctcggctctcatcaggcccggcgtgcattgtcttagtactccataacacggtgggaaaaaaagaggaaaatagaaaatagaaaacgacgaaaaacagccagaaaccaaatggaaaccaaatgagaccaagaggaaaggaaaaaccaggccataaagtaaaataacaacaaaatcgatctagatcatctccaaagaaagcaaagtaaaaaggtctggtattaatagaaacatctctgcctcttcctctgctcatttttagcttcgtccccctctctgagcggcaaaacccgcccttcaaaagttcaattctcccttccccatccttctcctccatttttgtcactctcgactcatctctccttttggggacatgtcgtgaaaaaacaccaatctgctttgtctttatcaccttcgtgggcaacatcatgcccgagaccgctaccccgagccgggcctggcaacaccgctttgacgggaagccaatctcgtcgtaagcatctttatagacctctcgggaaacgatggccgatggcatcgaccctatcaagtgcttcccctttctaatcccatatcccccccccacaggaatcccgccatcgccgaactcgatatcgaacggaatgagttggcccacacgtggaaaaggtttatcagcctcctcctgccccaggatcaggtgcaatgggaggaacggccacagacggtgctcgacgtgcagaccttgctcagcaatatcaaggcattttggatgtcccgcccccgacaacgggtctttagcgactccatggacttgtgtgatcgactcctgccgacggtgaacacgcacgcgaccctcctgtcgaccctcccggactcgatggcatatacccctttgttctacggagtgcttcaatcggtgatcaaggtgcgtgcataccgacacacaaggctacgtggcattgctaacctccggtcaggcgtcgtcacattaccctcgcgtaatggagggcctagctactgccctgctaaatattcacgatgctctaggtctgcccagtgattctagtctaatgtcaaacgccgtccaacatattaccaaaacctatgctctaatattcttctttctgaccgaattcatggactggtatgtgcggaggtccacgtgccagttgctgaacatgcatagccaggatgtgtactcggaattccatcacctggtactctatatacaactgcaagcacacaatattccatggcaacattccgagatggacgtcgacgaggaggaggaggacccatatagcgctcgggcactgtgggaggagtcccggctcagccaagtaggacgccggggaaaggaccgtcggatagcggcacagaataccatcactcgccggcttatttgggagattcagcaagacgcagcggagcgcaatcggtatagggagggccgggatcggttgttggcagagacattgagctccgtgcgcgagcaactggagccagtcaatgaacagagcaatggcattgtctgcataaccacgcctcctgctccgaatataggtaaagtcatatctgtctggagctcggttcaccgtctgacgtaatgacagacacgtcctcttttgaatggtcgcggggatccaagcgccgtctcgcacgccttgagattcaaagttcatccaagcacctccaggacttcttcgatagtgatgatcagatttgcgacttcgaacccgacgccaaagtcgtcgccgagggaaatatcgtcgcctctctacagcaatgggccaccagttcgcgatctcaggctttagccgtgggcgggactcaacctactgcttctctcgacccggtggctctaatttcggcttgctacgcttccttcgcgcggcaagctcgattgcccgtcgtctctcatttctgcgcccttcctagccaggaggtcaaagggctgaatctccaggagcaaggcttagttgccctcacctacagtataatccggcaattagtcgactggcttcctcctgtagtcgacagcgacgctgtcctggatctcagcgcggagcgctttcgccaactagacggaacgctcactagctggaaagccgctctatcgctagtcgacaccctcttacaatctgccccaccactgctggtctttataatcgacggcttagacgccatccacgatccgtctactgacggagcaatccgtgaactcgtccgcgtgttgctcacccacacccggcgtcagccccaaggtggtctcaacgggcaaggccctactctcctcctgaaggtactcttcactgttaccggcagaccgagtgccttgatcgagacaatgtcggaacacacactcatcctcagcgaatccaaaaccaacgaacccacgccgtccgaaccggtcctcacatcggacatcggagcggtcatgatgaatgcatgaattgtcacgcccagtgccgtttacgaaattctttttctgctgtttttggctaaaaaacgtttttgaagttcaagcatagatttgcgtgggttgggaatatttggatcttatgaaacaggcaccacaccacttatttatgcatgggtgtttgtcttcttctacaggcaaggctttcctgcgttcggcgttctcctgttgctttttggcgtccgggaggaccgaatggtttatttggtttctttttttttgtgcttcggtggtagtggtagacctgtactatactgcttgatagctgtgatacccatctaggtctaggattcatttgctattcttattttcgaacttgctcgtgctgtttaacggaaactcttttccgcgtcgcatctcggcactccgtatagccgatcacaatgcggggagccgatggacattggtttccgcctcaaaaaaatatttaaacggttcaccgaatgcatcaattgggatatacacatacacttacctatatgctgtaatacacacgatatacgcaatcatgaacggccacggagtttcgtcccgtctctactccccctccaccccgcaactcgccgagttcaaagacatttgctcgcgaaccacagaccctgcaacctacccactagccagcgaagtcaaatccaacatccccatctacgacctcgcggccctcgaatccaccggcctgacagcagaccttatcaaccgcctgcaagatgaatggcaccacatcctccacaccggggcgggcgtctacgtgctccggtccatgtacgcacccgcgaaatacgaaagaaccctaaacaccaccaacgaggccttcaacgcgatcatcgcgcgcgaagccgcccaatcaaccaagaaaggcgaccacttcgccgtcggcggctccaacgaccgcatctggaactccttctcaaaacacgccctgcaagacccatcctccttcatcgactactactccaacccgtggctcgcaatcgtctccgagtcctggctgggcccggcctaccgtgtgaccgcccaagtcaacgccgtgcaccccggcggcgccgctcaggaagcccaccgcgactaccacctcggcttccaggaagaagtcgcctgcaagcgctacccagccgcgacgcagctgacctcgcagttcctgacgctgcagggcgcggtcgcgcacagcgacatgcctatctcgagcggcccaacccgcttcctgcccttcagccagacgtacaagtccgggtatctggcgtggcgcaagcccgagttccgcgctttcttccaggagagctatgttgcgctgccattgagctttggcgacgggttgttctttaacccggcgctgttccatgctgccggtgctaacgagatggatccccagaatgggggcttccgacgtgtggcgaatttgctgcagattagtagtgcctttggaaagcctatggagacggttgattccgtgccgcttgtggatgcgacttgggatttgctgcttgagcggttccgcgctgctggcggcgctttggcgacccaggaacttgaccctgatacgtattcgttgcagcagagggaaattagggcttttgtacaggctgttgcggagggatatcctttccctacgaatttggatcagagaccgcctgcgctgagcggcatggcgccggagagtgagcaggatattgtggtgaaggggttggagggtggttgggataggaagcaggttgttgctgcgctggagaagatccatgttgactcgcgggcgtaaagcaggggtctttcatcccttgcgctgacagtatataccagtataaattaaatatattacgtgtgatgcatctagaaccagtcgtgtgttctttttccccgactaaccgagtcctccgtcactagtcaactagactgttttgatctcaagccacccgctgatgagagttgctcattggacgatcagacctcatcgcgtgtgggggttgtagtggacctgcatgtcgaacttcgcgttggagatcttcttttcaggacacgacacgcagtttgtgcattcaatgtggtagaatagatgaagtataagcgaaatggggacggagagggtctgcagtactccgtgatatggagtcgatcggtcagatacacagactaatcaaaagcaacgaatgacgaggctggaaagattccacaggggggaggaaggggaagatggcggtctcacatttttaccctgttcccccccaacgggtcctgatgaaacacggcatgttggatgtatccatggcgttcgcgtttttcactttcagtcttccttaagtctctacgcttcctttctttcttcctctctcgcaacaccctcttgggccctagtcattcatttactgtacatatgtacatctacggctttggtttgatctctcgctactaaccaattcgccgatccacatctccacctacttgttgaccattgacattcgacgatcgactaccgagtttacgcacactgcgcacactggtccgggaatcatacgaacccataacttggcagctatcgcgagaaaaaaagtacagccgcggaggttattggttcgcccggcgagggggaggcaaaaaacaagcagcgctaccaatagttcgtgtgctataacgggactatttttttttgcgtgtctccaccatagacacgaaagcccctccgcaatcgaaaccactgtcctggtttaggggtgggcccgcattgacgcaataaaggtcctgtctgccttccaagcttctcgcgatgggacgttcgagtctttccatcaggcgactgacggctcaccgatttgagcagctgcacgacatgccggaccatagcagcggcaatgggatgctgaatcctaacgatgtgaccattgatatccctctgaccgagacgacttctcgtggtcaaacgggcgcccgtaaatggaacaccaataccagtgcccaggacttccactcccagaccacggagaaggcacctattgttggcgttcaccgtggtcctggtggtaggcgtcgcatggatacagaaatcaatgaaataaccggaaagcctgctgagtcgcccgaagacggcactatcaaccgtatgggccgtttctaccaagctgtcctgaattactccctcgtcactcgttacctgatttatgtccttccaattgcgattctgatcgccattcccattattgtgggcgctacggcggcaacgtacgccaaaattggcggtgttcatatctactggttcttcacgtggattgagatcgtctggttcagtctgtgggtgtccaagctcttcgcccgttacgttccttatgtcttccagttcttgtgcggtatcgtcagctccggtacacgcaagtatgcgcttattctgcgcgccctcgagacccctattgcgcttgtgctgtgggctgttatttccctcgtgaccttcttgccggttatgacattgactcccggtaagaaggcttccggcgacacggctcccaagtcgtgggagaagagtatcaagaatatcttgtttgcgctgctcgtgtgcagcctcatcttcttggctgagaaagctcttgtgcagctcatctcgatcagttaccaccgtaagcagttcgatgccaagatccaggtctccaagcgcaatgtgtacttggtcaatctgctcttcgaggcttcgcgcaatatgttccccgtgtactgccctgaattccaagatgaggactcactccttttcgattccatcctggttcaggcttgcaataatggtggcaagcggtcctccgctatgcctctccgcatgctccgtaatgtcggcaagaacgttggccgtgttggcgacaaggttaccgctgcttttgggcatgtggcgtcggagctgactggtaagcaagtctttaacccgactgcgacacataccatggttatcgaagcccttgagcgcaagcgccatgctgctgcgctggcccgccgtatctggatgtcgtttgtggtcgagggccgtgaagctttgtacctagaggacattgttgaggtcctgggtgttgaacacgaggctgaggccgaggagtgctttttggctcttgacagggacggcaacggtgatatcagtcttgacgagatggtcatgaccatcaccgagtttggacgcatgagaaaggccctgaaccacagtatgtacgacgtcgaccaggctatccgtgtgctggacaacctgcttctgtgtgtcgctggtctggttggtgttcttgtcttcatttctttcgtcaccactggattcggtaccgtcattgcggctggtgccacttcgctgctctctctcagtttcgtgttttccgttaccgctcaagaagtactcggttcctgcatcttccttttcgttaagcatcccttcgatatcggtgaccgtgtcgaggtcagcgacaagcctttcatcgttgagcgtatctcacttcttttcactgtcttccgcaatgttaccgatgcccgcatcacgcaggtgcctaacaatattctgaacagtctctgggttgacaacttcactcgtgccaaggctatgcacgaacagcttgtcattcccgttgccttcgacaccaccttcgctgaggttcaattgctgcgcactgaaatggagcacttcgttcgcgacaaggataactgccgtgacttccagccggatattgacatcgaacttgacggcgttggtgatatggacaagctccagctgcgggttgacatccgtcacaagtctaactggtctaacgagactatccgcgctgcccggcgatccaagttcctgtgtgcgttggtcctggccgtccgcaagatccaggttcgcgctccaggtgttgcacctccggcagcagaggatgccgacgctgcagatggcgatgacaagggtgatgatgccggcgccggtgcagacgtaggtcaccgcaagtctacccagcccggcgcggccgattcctctaagcccgatcccggtgtcgccgctgccactgccactgccgccggaggtatcctcgaccacgagaatacagcccagtcgacaggctacgaccaggatcgagcaggaacagtcacccatcgcggctccacccaaaccaacgccacacaaaccaacgccgagcgcgaagccgccatcgtcgaactgctcaacgcgcgctccccaactgtcgacatcggccgcgatcactacaacggtcacgagtcagccctccaccgcacagccagcaacgcctcccaccaaacccatctaaacgttccccacggaagcgaaggcatcaaccgcggcctgtcaaccggccaccgcaaggccggcgatcgcgcctccttccaggagcaggatacacatcccgcgctcaggaacccccaagcccctctctccccagtgcccgccggcatgaccccatcctcaagccaagtccccatccttgagacccccaagcccggctcccgtggcagcgcccgctacgagccgcgtccccacgcaagccaggacgaaaagagcaccatccagatgctgggctcccccgaccccaaccgcttcgacggctactactcccacgacacggggtacaatcaaattccgctcggcgggtacagcgctgagaacacaccgggacgcgatcgtcgcgactccaacccgaatatctccagcgtgacggcctccagcaattatcaactctctgaccgatatgaccccgcctcgtcgccgtccatctactccccgcctcagcctcagccgacggtgccacagcaggctgtgacctacaatactgctccgctgaggaagaaggagaagtctccttatggggagcatgaggcttgatcgttttctatctttgtttttgtactgactccctctccttgattacacattcttggctagctgcatctttgcatctttgcatctttttgcatctcctttttcttcttcttggttgttcatattatgtgtgtgatgtatatagattctttcctttgcgtttttgagccgcataaaaattctcctccccttcgtggtatgcggctatgaacctatgctgtcctcggtttttgggcatctaaaatcaaatctactttccttttttcaggacgattccgttggtgcttggatggccatgctacataccgatgcctcttacaacagagacaataggataggcaagtggcattggaacagaaaagaaaggtgctgggactatgctttataccaaaagaaagctgtgatataatacttaataagattgaaacgccccaacgaaaatatcgagcagagaaacagatcatattcccataacctaacacatcgaatacaaagtgatataatacaagtttgactacggagtaagtctaggcaaaatagagctagccacgtccaatcccatcttccaacctatttatttccagtctccttccatggatatccaacaggatcatccttccgcgtccagatcttggtcttcctcttattaaccacatgctcaacaaacacctcgcgcgtgtacttggccttgtactttcggatccagcgcgggtcccaaagttcactcgcaatgcctagatccttgcagcagcgcacgagcgcgttcgatcggcagccttctgtagcggtggggataccgtcgggggagaaatagtcctgttcgccgcgggcgacggagacgaggctggagagaaatgttagctagtgtttaggttctcttgttcctttcccaatacagcctggatgatgaaatcaagactgtaaagcagattgcatgtaaacgaaaggaaaatgtaaatgcgcttaccgtccattacaaacaagagcatactccctcgtcaccgtcttgggcgtaacgatactctcactccgcggcacgagaccccacccgccaggaccgaatgcgcggttgagaatgcgtcggtatttgatctccggcaggtacaggataccatcgggcttgatctcgacctcgtctggctccgtctccgccagcaggatatcggccgcttctttgggaaacggcgcggcagacagaccgtggaaggatcgcgtccagtcgattctctcttcggctgggcgctcaagctcgagcggtttgtctgataggcctgttttggagatgttttcggttgttgcgcggctgggggttgcgcctgggaggcgggatgcggggacgcctgttgggatgggtgttgaaggtgatggggtgggctttgcggcgggcgttgctggtgttggtgttggtgcgggtttggcggtgttctggtttttggtggtgtagctgattgctcttctggtcatcgggctggagaactggctgattctcatgttaggggctcttgaagagcgcgaaggttgtgtcgcattttgaaaggactcgattgcgcgccaggaccggatacgaagaggagcagacatcgtggcttgtattgttgatagcggaaggaggatggaggtcttgcgaaaagcatatatgcagtcacgtgatatggatttgatagcttcgttctgtcaatgttgggataatcgggtgaatattgagtggaatagattgcagggactatttgaacatggtattataggtagagtacattatgcgtctttggtctgtgttcgctggtcgttgccctggcgcttccagcactcgcggaaagcttccatctgtgttgactagagtcagtatgatctgggtaattgaagctatttgctattcctcccattcattggactttggaagttgtattatggttattgcagaactagccctcaatggctttaggtggaatgatatatgttcagttcggtagatttgatagctcacctcttttttgcattcgcgccagtccttctttgcgtagtaacagtcattcatcttatcctgctcagctaatatgtattagtttagcctttgtgactcaaattgagtataagttactatggcagcctgtgctgaaaatccgcttatccctgccattgcagttagcaccacgcagaccagaaacctaatacagggcctcaccaatcatccggctcatcatcatcatctgggacaacagttgtcttctccacgttgttcgacatggctgaggtataacaaggaaagttggagaaaggcggttggcctcggcggaagatggagaactatgcttatcgcatgatctgcctttaccacgaaccaacaatggcaacgccaacgggcaacaacgccaatttcagtggcaaaaggcttaatgtcctagtctattccggttcgctcaatttactcagtctggcagcttaaccgatttctaactgatgacttcttgacaggaaatggaaccaccgttgactcagtccgtcactgcctctacaccctccgccgcctgctcgctcaccgctatgccgtcatccctgtgacgggcgatatgctccttaatgagccatggatgactacgtgtgctatgctggtcatgcccggcggtgcggatatggggtactgtcgcacactcaatggtgtggggaatcggcgcatcgcacaatttgtccgtaatggcgggcggtacctcggcatgtgtgctggtgcctactacggaagcaaaaggtgtgagtttgaggtcggcgataagacaatggaggttgttggggatcgcgaattggctttctatccgggcatctgtcggggcggggcattcccaggcttcgtttaccacagcgaggcgggagcacgtgctgtggaaatcaaagtgatcaagggagctttgaacattggcaccgtgccaaccaacttccggtcgtactataatggcggcggtgtgtttgttgatgcgctgtcgctcgcagataaaggggtagagattcttgcgagctatactgaaaaattgaatgtcgatggaggagatggtacggctgctgttgtctactgcaaattcggtgatggagcagcagttttaagcggacctcatcctgagtatgttttggatttcaattgggaggattaagtcactgacttgtgactagatttgcggctgctaatctggacccgaaggagggcggtcctgaatatgcggacttggtggcggctatcgctgccgatgacaaggaacgaacggacttcttgaaggcttgcctgtccaagcttgaacttgaggtcacacaggacacgacaacagtgccttcactgtcatccttgcacatgtctggaatcgatgccgatggtcccatggatattctgtcgggtcttggagcttcattcacccaagagggtcatactgagtatctcaaggatgactacgatacgttccgcatcgaacgccctggaacatggaatctcggtgaactagaagaagcactccccgcaacatcctcggagtctagcgatggtatcattgattaccaggcaattattaagcgacttgtgttccacgatgatataccatcttcgaaactgactccatacttcaaccaccatgcattctactcccacctccgccaataccaatctgactccaagggagacgctacatcatttggctctaatattctatatggagaggtagtgactagcacgaacacacttcttgaaaagtaagcatttggtcaatatggcatttaatcggctctaacaattagtaggaacacgaagctgctgcgtcagttgccgcagggttttacggctaccgctacagcacaaattgccggacgcggacgcggatccaatgtctgggtctcaccagcaggttctctaatgttttcaactgtggtgcgacacccaatggacaagattcagacagcaccggttgtgttccttcagtacctatcggccatggccgtagtccggggaatcaagaactacgccaaaggctacgacaagatcccgataaaactgaaatggccgaatgatatttgtacgtgcgggtggcttgttttattactatgggttgttactgatagatctctacagatgcattggatccagatgaccccgaacagaaacggtacacgaagatctgcggcattcttatcaactcccatttcatgtcaaacgagtacatctccgtcgtcggtgttggcctcaatgccacaaacgcctctccgacaaccgccttgaccaccctcgccgcacgctacgcgtcgccgggagctgctgccgcttcacctgtcatgcttgagaggctcctggctcgtattttgactacatttgaaagcttgtatacccgcttcttgcgcacaggcttcgatcgagccttcgaggcgatgtattatgaagactggctgcacatgcaccagattgtcacgttggaggaggagggtggtgctcgcgctcgcattcagggtattacgcgtgattttggtcttctgctagccgaggagttggggttcaatgatcgtccgacgggacgtgtgtggcagttacagagtgatagtaacagctttgacttcttccgtgggctggtgaagcggaaggtgtagaccaaaccaaaacagataaataggtcgagacatccatgtctataactactagttcatacatgtgattttgctcatcaatatcccaaagaattaattgtagaccaacagacttaagcgggaacaccctcgaagattgtccctaggtataacaatcacttgccgtgcgagggaccagccagacaaaagtcatgttatcgtcgtcggtggccgcgaatcatagactttgtccttgtccttgaaatgagaggcctcatcaatcgaaatgttcgcgcttatacatgaccttcaatataagcccttttctcaaacaactccccattcagatatgatgtggcgatctaatgtgtatgaagacgttatatatgcagtcggaaaaaagtgcgtagtataggatacaatgtcaaggcctcgactcagcccatgagacccatcgtcggatacactcatccaccctcctcagcgactccttctccgcctcgacctcaaaccactcccgatgctccttcccgcactcgggacattggcctaagtcctgtatacgctgagccgctagctcaaggtgaatgagtcgttccacgcgatgcacatgcgggactttccttcccggtactaaagatgcgctatcctggctagggtgggatggcgtgtaaggatagtaacggatcaaggtcaagtcatatgagcactgtttactccattcagcaagccgacgatgcacattgctcgtgcgtccaattttcagcctaagcgttcccggcttggttgatgtcgggttggaggtgagagcgttcatgtcttgtgctgcacggattgcgtcgctgacgctgcgtggctgcgtgggtgggcggaggctgttgctgctttgcggggcctgcggtagtagagaagatgctatgtctcgcgctaccgcggattcagcgctccgttgtgtggtagttgtcgggggtgtcaaccagaacatgtagatatagccttcgtcatcggcactggatattggtttggccagttctgcaataagaatggatgctgtctgcgggggaactgtagacgggatccacgatgataagggcctgtctgacaaagatggtgacacttgcgcatgctgcggccttccagctgtagcgggcattgcgacattttgatttgaagaaggcggaacgccataagccgggcgaggcggtctcggctgaaatgaggtcggcttgtcatcctcgccgctgtcctctccgatctgaaagcagcagcaaaatgtgtgtttcctccggcgacgcttttcactaggcctactttgatatgtatggggaggctttggcttcgaggagactggatcgtttatctggagcacacccagtcgatccaataatgtatcgatgcttgtccttgtcttaactggggtgatgccattcgtaggtggattcgccgaagtatcttgatctttgtgctgccagcagtacaaagatgctgcatctatagcttcttgacgaggatccctctttcggggggtaggagcaggtgatggatttggagatgccaaagagcggcggcagggccgaccttgggaagtgatgcctctacatgttgtcgctgggtttcgagaatctgagcgcggaagcaaagattctggagtgtttggaatttgaggcatatatgagatgagatcaagtgaaagaatggtatatgttgtagatttctgcgacgtgaacttaaaatgagaaagaaaccattagggaaaaggaaaggacactaggctatgaattgcggtgagcttccaaaattcagcccagaggctacatattctccacttggaccacgtcagtgggacgctgggcagctgagaatagaataggagacttttgttgttgttgttttggtgatcggttgcaccgccacagtaaggcggtgttgtaagtggctgtgctcatgctcattgcctcggcataattggacaagttgtacttgattgctttcattcagtttcaatgattgacctggatataaaacttcaatatgtcttatgttaatatctttcaaaccaggccagtgcttgattctccgcttcatcggcctgtctactggcatcttcctgaaggaaatcagccctgacacagaagccatggccagcgccctcatagaccaccacttcaccctttccaataccggactcgctgaggaagacctgtttgatctgctcaatgtgcggaggtttcacgaccatatctttttctgcaagcgcaaagcttacagggattctgattttctcgatctcgccaggaatctcgagaaagctcgggtggcccgtaaatccagcattaagcagtggttttccatttgaagccgtgtctgctccggcagctagattgacgatatactttccaccccagcagaaaccagctccgtagataggaacctcggcaccttcgttctcgcgtacggacttgaagaagtccctgatgataggccatgtcacgccgaacgtattgtagtacatgaagggcaccattcctgtcagcattgaggctagatagtatctatagcttggattagtagaaagcccgacctgggcggtgttttatcgacttacggcttgataagccaagttgtgagtccgctggtattgaacagctcttttgttgcagacagcatactgaccggggccgcatgtcctgatatcatacttaacgagttatccttagggatgacactaggacataccgttcatgaactcaggtagataaacgaggtacttccccttttccgcgtagttatcggccaagattcggttgttcacaaactcccacccgaaggcgtcaggcactatgatgataattccccggtgaggtacctcatttagaggtttggtcgtgtaggcctgtaagccatggagagaggtgatttcaccacggggaatgccttgatggatatccccactaaaacaattgggacacgacatgttgcgatgagagttaactaggctgataattgcaggatgtgaagtgcaagagactccaagcacttacagattacccctctcggccccccgatcacactaaaccggattaggtcggggttgatatagatcatcaatacgagatgacatttcaccaaacatcaatgctagtgatctcgggggccttaggcctccggatagtcatagcggagagaagtgactaattccaatttccgaggccacgtagtaattagagtacagggggagaacattaaacactctgcccgcacggagtctagtaccttcagaacactctctgttcttagcatctcgacaagattagtactaataggtctctcgattgctagcacgcgagctaaagggcttcaaataacacgagtagccgtatctagcgaatggggattgggttgcttggcgagaaccgggtatgtactttgctctatcaggtgggggcttcctatttcagccgctttaatgagggcgcttggagtcagctgactcagagtagatttcagtccgctcggagatagtcacgtgatatattagtcacgccattgagagcccctggggccccgggccgtgtccacgcggattccttaattagagtttgatcagagacatctactgactcataagaaaacagggacttacgcagtgaaaatgagacgaagaagcaaaaacgcattcgatttagaaggcagatacacgcctaggaaggtctctcagtttaagaagcttcagaattgatcactgggcgggtagaagcaaatgaaaccgggtttacgaccacgtacaaaacactccccggggtgtggaatatacaacatacagattgccaggacgagaaagagagacgtgtccagatcgatctcatattgagttttattttaatctaatagccttttagttgagataaatgcatttgaattcaatggggacctaggtatattgagactgattcggctctctgcatgtctgtctttggaaaaaagaggcgattttagcggagatgcttcttggaaaaggtaagcactagctgtttcaagtcattagttgaggggccaactaagtaatttacaatagaaaagccgcactaagaaatcctaacaaattagagttcttctggtagcgatctctgtactatcggaagtgctgcctgcggaatctttcgcatgaaatgtaaacccgcaatactataaagacgccagggtctcgtctcctgaacgagaactaccaccttcttaagcccttcaatcacctttgcatcttctcctagcatcagtcaccatgtctctccctcctgccgaaaagctccctcttgctctcaggaagaatagtccgtatttcatcatcactcccaccgttgctgaggtacaaaaaagctgactataccttggcatcacagttcgcgacacgtatgagtctgcgaaagagaccattgaagccaacatatcgaaatcactcagcgtcccatggacaattgaagtgaaccctctcgcattatatccttacgcggactcgtcttacgccaaggatgacatgggtgcgatgattgtggagtaagctcacaccttcgtatcggcaccagtggatagtgctgatcttctacatagatacttcaacagtgccgcgtctcacctgaacaacgttgacgagttcgcaaagaccgagatcaacaagttggcccccaaccatgttctgtcattggaagtcgacagcacgcttgaccttaaatacaacggcgttaatttcaacgatggcaacttacgaattgtcgtcaccccgaaggggcttggtgtcaacatagattctgccctagagagcgacaatatgaagctaggactcaatgaagcggctgccaaagctggcggccaggacgacatcagctacattgctcgtgacaacatcggcaagaaatatgatccagtcatcaccaatgtgaagaatcggctggagcaacttttcggtcaaccatttgagcttctcccgaactttgaagacaacttcgccaaagtgaaaaaggagagtcaagtccccggcacaaagctgccggatagttgggaaacaaactttggcgctacggctctggagtacttcgagtcgctagctacacatcttgattggaacaactttggcaaagatgatttgctcaaagaaggattcctcgagtccgtcgacaagggcaaagtcgcactgcgtgtggtggacaagcttgaagggtccagcaactacaatgaagccaagatcgaggatggggtgctatatctgcagaccaaggcagatacttggggtgtgaacacaaatcaagcatcccagaagattgtggatctcctgtaggcaccacacaacaaatacatatctagcccgagcttggtagaatttatatttatactgtgcaatatacttcataatctcttttatagcttagtgcccatgttcacatgaaccgccttagtctggctatatgcctccagacccgcctctcccaactcgcgtccaataccactctgcttcacaccaccgaaaggaatgcgcggatcacagtcttggctactgttaatccagaccataccggactcaatctcagcggccacacggtgagcacgctccaaatcccgcgtgaagacagacgcacctaggccgtaagtgctatcgttggcccgacgaatagcctcttcctcggtatcaaaggggaaaatcacgacgacaggaccaaagacttcttcgcgggcgatgcgcatggaatccgttgcattgacaataacggtaggttgaacaaagtacccattcttgatcttctcgtcagtcggcgtgtaggcagcaccgccagtgagaatagtagctccttcgctcttggcgatttcaaagtaggagaggatgcgctcatattgcgcgcgtgtcacctgcggcccgtgggagactgtctcgtcccactggtctccgatcttcatactctccaccgtcgccttgtaactagcagtgaaggcttcgatgatatcgcggtggacgaagatccgcgaggtggcggtacagatctcgcccttgttggacatgataccgccgtgcgaccacttgaccgcctgctccatatccgcatccgggaaaaccagcaacggggacttgccgcctgtttcgagcgtgatgttcttgagagtgccggcggccatcttcataatctcccgggcggttattgttgatcctgtgaacgcgaccttgtcgaccaatgggtgcgaaacgggcgcggcgccggccccnnnnnnnnnnnnnnnnnnnnnnnnnnnnnnnnnnnnnnnnnnnnnnnnnnnnnnnnnnnnnnnnnnnnnnnnnnnnnnnnnnnnnnnnnnnnnnnnnnnnnnnnnnnnnnnnnnnnnnncgccaagggggcgcaaaaggggcgcggcgccggcctcgcgcccgtagccgttgacgatgtttaccacacctgggggaaatccggcctttttgatcaaagtaccgagaacgagagcgctaagaggggtctgctcggccggcttcagaacaatcgtgtttccacatgctagtgcagggccaagcttccaggtggccattgaaagggggtagttccatggaatgatctggccaactactccaatgggctggcggattgtgtaggcgaactttcgagatgtcgtggtgatggtttgaccaaaggtcttatcagcccagccgctgtaatagcgaattgttgagattgcctcggtgagatcatcattgagggcgacatggtagggttttcctgatttggatgagcaaattgacttttctgagtgatttgcagacataccattatcccaagcttcaatggacgcgaataactctctgctctcctccatcagatcagcgagtcgggccattaactgccctcgctctgtcgcgggaagtaatttccatgaggggtggaccagcgccgctctggcagccttcacggcgcggtcgacatcttgggcgcttgctgcttgaacggtggcaatgggtttatcggtacttgagaatagttagtgatatgtacaacagcgatttcgataatgacatacgcggggtcaagagatgtgatggtctggcctcctgtagcggatacagtttcattgttaatgaatagaccagtgggctgtctgtatttgtgcccgttaggcgtatatatatcaatgaagaggctcattttgtgagttgaacagttttcagagactccaactctcgaggcgcgtggggtctgatatagtacatttctccaatgaggttaagcccattcaggcaagtccttccgatatactctccgcggatgttcgaggttagtggatccgagattaaatgatagaatagttaactatcgtcaatttatcttaatcgtagtattttccattatctaattattccacagccatctctcatgtcagatcagggagtcatgtttagccctaatgcgccactcggagcttatattttctctcggctctgtttggctgaatatgtatgtcgcgagactaattctaattcgatacgctttggatatgaggttaatacaatcaaagaaaacaaactaacaagctcaatataactgaaaagtgacaaatatattgttctgctgcccaaatatgatatagccggctgttgatctctcgtctctggagtgcttcgtacgtacgctgctcttgctgtcacgggatcggcttgccatcttgagggtgtatgggagatgttggtgttgagtgcgcaccgccacggatttgcaacaatatggactaacagccctcatcgcttcctatttgggggctctggttcttcgcgccgtgtcggtcccaggccatttaggagggcgcggagccaatagctgttctagttcatgtatagtgctaattgactgcacggttcagtctcctcagtcgcggacaactagccctcaatggctcatttagttcggagacactgcagcttgcgatcggtctgtatataatagtaggcaaggtagtttgatcagttcgtacgttgtgctggtgctttttgatctacccgacttgttagggtgtagctaaaacccgtcttcgtggtcaagagtgcagtagaaggcaaggatggcatatagtggctcaatatgtcgtggtgtaccattccaccctagatcatcaattcgcttgaagaccaccgtgtgagctctaccgggcaaataactatatccggttgcaacatcttccaaatgtgcgtcgtgggtcagaccagattgcgggtggtgtggatgcagttcgttcgcggatagcactgtatcataagctggcagcatttcagatctttctcagtgtccgagacagcggagcgcagaaattgacgactgaagtttgggcgggtcgttgccactagcgacaatgtgatgccagtgaacgtatctgtgagactctccaatggaacaagggcactaacattgcccttggttgtgtcactaagtccaattccaagttccagggcctggatctgttagccgttctgaaaccgcgacaaaatgggtgaggtactggagcagcatgagaatgcccgctttgaacataggagcgttcgtgtacacgtcttcaagaaagtcacggatggatacattccggaatatcaatagagggtccagcacaccagatagacagtcagcctgtcttgaccttcttcaatgtgtatgtatccacaggtactattcatccaagctggcaccgaaaaggaaggaacgacatgcaaaactctaaaaaaaaagagtaaccaaacatatacgaaagcaaacgccttgatcttctgtgcattttctagattaaagctaggcagacctcactactatagagatgaggttaaaataaggtcgcctgtcaaatatctcctcaccagttatagttgaacagtgaggatcaaacacgacgatatacagattctgattggtcaggattctacaattcgcttaatttctaggctaccatggttcatttagcatagcttgactgtttgatcagaacagcttcaatctactctcattgatccttcaacctgtaatgagttctatctcgattagaactggaatttcgaaaattcaacatctacttgcaatgcggaagcctcaagatttctagaaaatcgcctataactggaaggatcaataatttcagcttggaatcacttcaaacttaatcaaagttacgtgatctacgtgcctgcctgtaggtatataagtagagccccctccccccgcgtgcgcgtaatgtaagtctgtaagtctataagtcatgaattccaaaatggcaagcaatagcacacagaacgaaactcctgcctggctgaattccgtgttccctggcgcttatggcctcattggcctagttgttgtcgtggccctggtcttctgggccattcggtacgtgcagcctgttttgatcgtattggtccgtcatgctaatgagatatatgtccagctttttggccctagaggccagacttagcgacccccaacgggcgctaacagatcatttcatccggcaagttgccgaaatcagaaaggccaaggccgcaagcaaaatggaggagaagaaggagaagaccgaggagaaggatgagaggaaaaagcggtgggcggactggttgctgaagccgttcggttagcataccccagaagtactttttggaagcataggtgttgggaaggatgtatactaaccaagagtgtccgtccctaggccttcttgagatttccttctccaccaatgccatgctccggcgcctcggcagcagcagcaacagaaagaccgaccaccccgttttatacgtcattgtggaggagtttggtgcttctacggcggaagcggaagccgagcttgaagacgtcgactgcgatggcattgtgatccgatgggtgcgtgtcccgcgcgggtaccgtctcccgcccaagtccaagaaggctagcacgttggccgaagttgtcggtgccctccagggcagaaaataaatctttgatcgtcttgtctctaccacctaccccggaaccggccgggatggtggattcgctcatcctttcctcacgcaggccgtaaccccctgctgttacttattgtatatacatgtcgcttgccatgttggcttgtttgggcccttgttggacctcgttggacctttttggccccttttggcccgtccttgtttgttctggattttggattgtttgtttgtcctcgggtgttttggagtttgtttttctttatttataccctggcgttggtgttggcggttgtgctgtttgttctgttctgttatcgttattgaaatattatttattggatccctctatgttgttggaccaaaacgatcctgatcatatcttgatcctctctccattgtagatctgcatgctcacgatacttgtgatgaggaaaaaggatggggcggcagaaacgctacccgtaagcggtcagccgactcacatatctgacagccaatcagcacgtaggatttaacgggcactcacaagtatgtaatcaacctccagggcttccaaggttggaaccttcagaaaaccttctacgcaactaatccattttaggagggtgatcacactatgactcagggatacctattaatgaggatcgtttttctatgctttcttcaatcttctcctggtcctgatgctcatattctacaagtttactcccaaagtactttccaaggctttcttatctttttctcgtgctaagctttccacccacgatcatggagcttttcttctattttctcaaacgcggagcagtagatttctaccggcaaatattcgccgatatgcttcttgccgagcacgctctgcgcgaactatcgcagcgtgaggaatcgctacatcatagagccatggccttacaaaagaccgtagctatcgagtctgatcgactccagcctgacaagaccacccctgtcgagtctaccagggccgagcttgaaaatacgaatcaacagcttaaagagatccaactgcaatattcaagaaaggagtatgccctttaccgagcgacctctgggcttccaccgtactttaaagaactttatgataacttaaggcgtgatcctaactggtttatgcgagaagaactagttcaggattgttcggatcggggcggctgttgcagccgggaatgtggatgctgcgcacagaggtatatgtttcaaaggaagaaaggcagaggtcattgcaccacagagtgccagtgctgtatcggctttcgtggcttcgagtttccagaagaagataaagaagagattagaagagacttcaaagctagggttgaactcgaggacttggcgtactttatgaagctgacaaggtggtctttttgcccgataaagcgccaaaggctttcaaaacaaaagctccggtggcatcgaattttcaccggttccaccgatgagaaagagtcatgaggatggccgtactttgcttgaatgtcgctactttgcttgaatgtcgctactttgctagagaatgatctgctaggggaatagattcttttgactagttacgtagataaagttgatggtgtcacagattagccagctattacagaagaaaatgcgaaaacattgcttcattctggcagtaatatgttgctcaaatagtccgagtgttcaggtagagattgcgcacatgctctttcccccgtgggtgtgcatgatggacttgaaggcctcgcagctttcattctcgtcgtacaatgagataatgcggattacatatctttttgcgaagacgcatagcgtccgcctggtaagaatcggagccttgggtgttctgaagctagcaagacgtaatcatggcaagcagttccagaggggagggggagtagtgctggactattctgtctgccatgagttgtagtagcccactggatacggagtacgagggaagaagatgtcgaccagaaatgacgcacttccgtacgttccttacctctggtgttgtattagtagacgaattagtcttatataggattccgatgaatagcagggaattagagctagaatagaaagaagccttcatcccgatgatagtaatgcatcctaaataggaaaatttgacccaacaaggcaagtcactcctctacagctcggaatgagtagaatcatgaatatggaaacggtaagagattccagcaaaatccaagtatatctagattatgaccacttccaattcaaccatcctcattatctttcccaaccaaatcatctcttcctctatacctctacaaacctccaaaatggcctccctcggcggaataatggtggccctaatcacccccttcacagacgacaagaccgcaatcgatccaagccgcctacaagcacacatcgagcacttgatcacagccggcgtgcacggtctcgttccaggcggcagcaccggcgaattcaccacactgacagtcgccgagcgcaagcaactaaccgagctctgtgtgaagttcgccgcaggccgagtgcccgtcatcgccggcacaggcagcctctcctcggccgaggcagtcgagctctccgtacacgccgcgcaagccggcgccgcggcgaccatggtcgtgcccccgttctacgaccccgtcaacctggaacagctgcacgagctgctgtccgagatccacacggcctcgggcctgcctatcgtctactataatatcccttctgcgtctgggatcaccctctcccctgcggagatcgctggtctgtccaaggtcggcgtcaagtacctcaaggatacctctggtaatgcgcccgcgctgacggagctgatcttcggtctgtcggatcagattgtctcgtttaatgggtgggatactttgactttctatggtcttgcggctggcgcgcccggtggtatctggggtgcggcgaatattatccccgagttggcggttgagctttatgaggcggtttccgtgaagggggatttgaagcgcgggcgggagatttgggcgaaggcttggcctatttgcaagttcttggagtctcataactatgcggctgctgttaagactggtgttgagttgattgggcagcctactgggggcttgcgcaagccttttgctcttctcaatccgaagttgacggcggaacttaagcagttgttgcagaatgctggagttaagactgtttagtattctgttctggattaagatgattgaatgtcggaatgagaatgtcacacttactatccactcaatttattgaatatacaacattggaatcttcttcgttgcgtcgtaaaagtgcataatagagatcgcagaacataaaaaagatgagaatagccacctggatcagcaaaacaatggccatatctgtccttgcttcacagtatcaacccacgatggcatcgattcaccccggttcgcggtcagatgctcatcctgcttgcaccacacttcagtgataatatttctggccgttccaaaagcggcaaagccacatattgagctcgccctatctaacatgatcataatcgcctcccgccttgcggttgacattgcctcacatcctgcaatgaacaacggccacgccgttccgggcccagtgggatcatcttgcgtcaatgtcgcactgcacgcttgaagcgctgtgataacactatcaacatgaccctgcagagccgcagggtgggtttgtcgaattcgtctgtaaaagaaaattacgagagctgcattcaatgcctccaccatgtgaccgtgcgattttgaatcggcgtggagttccaggattccggctcttgttcggcctaggctgaaagagcagatcatgttttccaggcgcgtgctacgtcgctgtagtgtttcccatgcttcgaggttcatggtctgacctgcctcacgggcaatacggaatatctccaaaacgttggctagtcttgttgtttgcgagacaaggctaagccatgtttcggtgatgccataaatttgcttgtataatgtttcagggtaactccgtgagtcctggagatgaatgtcataaagtcccgaagcttggtccttgggttcatcgatattcagatcactatctgagttttgtgtctcgaggcggaggaaatcgtccagccgaggatttggctcagtgctccccatttctgaactcggtgaggatcgtgattgaaaccgagaaccaagtgcttcaaatgaggagggagagaggttatagtcatgtagaacaaatgtgctctcgccgactattcttagccaggtgtagacatgatgcaaaagccgtgcctttttggaaatccgggtctttgaaagtcctcgaagacgtagtagccgctctgcatcaatcataaaacaccgggcgtgttgttgttggccggacatgatctgtgaaagtcagagtcattcaattgaggtcaaattgaaaacccacggtgtactgtatgagaatgaatgcagccatcagctggtctttatattttgctttcttcaaaccctgggtttctgaatgcagagaggtttgcatatggtccttggcttgcagatacgcctgggtggcaaccttccaccaatacccaggcggctttgtcgatattgccgcggggtttaaaacaaggtgaatagcagagcaggcgagcaagccatacaaatttgcaagtttggcatgactgatcctttcagtcccaagaaaggtcgagtcactgtatgtaaccaccgctgccggcacgttcaaaatcttccaaggcgacttttgccgacagggaatggccattatgtgtggaatgacaatatcctggaaatgtctaagcaggcacggagcatctttcagtgcatctatatcagtagaaataagctcagctggtgcgtattgtgttgtgaaagtctgcagctcattggtgtgatttaagtcaacgggcagtcccatctcgtggctcatatcaaatgataaatcattcggcgtactcaaagcaccgtttgctgcaaactccgtctggcctaggtcaaagctcaacagatcagaccaatggaggaagtcatcaatatgagacagggaatcaagtggactaggctcttgcagttcctcaggagccatagtttcggcctcaactgcaaaatttatatcagacttcacgggctcaatttcatgcaccagttcttgtggcttttgtggtgccgaagaaaaatcaagaaccgcaaagggtccaatgacaatgtcaccgtcgagcgaccgttcagggtctcgcagtctcgagtccacttctgccaatgatgcgtcaatagagcctgatataagatcggatccaagcgcagtgctcatagaaactctagattgctctaaaacatgttaataacactaatttgttccatactgtcaaggccatgtacctgaataaagataccggcgagtcccacgagtactctcagcctcctcgccgctatcagtgcgcatccacagtacctgatcggaatatccctcgcatttcacacccaaggcccggcaggtacgacaaacgggccgtttctggtcgcatttgacatgccggcgtctgcaggtgctgcatcctcctagcgcatgggatcggcgaggtcttggtcgtttagatgtcaccatttttgaagacttgatatatatattcaattaaaagagcttattgcggattcatttccatattagaggttgggaagtcgaagttatggccaaccccgccaatatcggaagcgccttcctagatgggatctcttatcgggctatctcctcggagtcaactgctcttgtctttcttttgacaacaattccattccaatcagatcatctcgttgtttgccataaaacatcagtgggacggccaaatcagattgggccggtcaagttgggaatacagctgtcaacccgtttgtttcgcacctgcagtggatgatgtcgtggacttggtatacacgttgagatcagaagtggccgtccaaaacacacacaaggctcgctctagataccaagaacacagtgtcctgagccgtataagcaactctgactctctttttgtagagcctttccttaccagacttgaacccagcacgtttgacagcccatgcgcaatctcctcgacgctcttgtatgaatggcgctgatgtcggttgtataagtcgttggcatttggtaaaagatctgtgcgactgaacattgacccatgacattgtctgaggaatgtcaattcggcaagcgactccgatgatcgtccgtgataggaaaccaactcagaaagcactctataccaaagagaaacaccttatgcacatctcaatccggaaaagggatgacctcggaaggggagagaccatcgggaatccttcatatttgaactgtgccgtcgtcgccttgctctatccattcttcttatccaaattctataaccacatcctaatacatacggtacaatggctcaccgcggggaaacccttcacaaagatgtatgctgcattgccgacctgaagcaaatggggagcagtcggctgtctccgatggtcagaggtgagtaccaatgaatagtttccgacgttggttcattgtgccagtgctgatgtcgatagactactacaacggaggagccatggatctaatcacgtatggaacctcgaagcgcagacccggtccatctccctgacgtatgtctagtctgaacgagaacgaagcagcctacgaccgctacaagatccgcccccggatcttaatcaacgtcgataaaatcgacacaaccgccgaaatcctcggcagcaaggtatgttatattccacttcaacagaaacgaaaacaccagtgccaactccgacaatcaaacaggtctcactcccattcggcttcagccccgctgcatcaatgaaactcgcgcacccagacggcgagctcgcgacctcgcgcgcagccgcaaaatacggtctctgcatgggcctgtcctcatactcgaattatccactcgaggatgttgccgctcagggcaccggcaatccgtatgtgatgcagatgtgtgtactgcgggatcgggcgattacggtgcagttgctagagcgggcggagagtatgtatcttggatgctttttttcatggttgactacatagaccgtactaatatccttttcagaggcggggtacaaggcattattcctgtcggttgatgtacccgtgttaggcaagcgcatcaatgaataccggaatgagtatactatcccggacgatatgtcgtggccgaatgtgcttagccacggaggggatcactcggatcgtaccgagtatggtatgtattgcgaagctgatgtggagttattgtgagggataggtaaatgctgatgttatgcagaccccagtttggactgggataacacgattccttggttgagacagcatacatctctgaagatctggcttaagggtggtatgtttgcgtggagtgatcaagtaaaggggctcgcagttcactgactattggcagtaacgtctcccgaagatatagaactggccatcaaatatggcattgacggtgttgtcatttcgaaccacggtggccggcaactagacggcatgccgtcgacggtggatgcattgcgggcctgtgccccggtagccaaggaccgaatgccgattgcggtggatgggggcatccgacgcggctcggatatcttcaaggcgctggcattgggggctagcttctgttttataggaaggatcccgatctgggggttggctgtatgtgtttgtttgtttgtttgttaattgttctgtttgctgacccatacagtataacggacaagaaggcgttgaattggcgattcggattctccgccaagaactgaggatcaccatggcattagccgggtaagtgattattggtctggtatcaaattaataaaaattaatcggaagcaggtgccgaacgatcagcgaaatccaaaaatgctatctttctgttttgcagccggacggaatcttctcgaaactgtgatacaactgcgatactcggtatttttctctattttgaggcttttatcatacacctccctttgatatgcgcaatgaggtcatgtgctgcatcctcagggcttggtatgtcagctgtcacgatacgagtacttgttccatacaagccgtgtgccaagcccttggcaacccgacagggctgaaggcgactttgccagcgttttcctggagaacgaggctgtgcaggccatacgtgtgccttgtagcctacatagccacagttagtggaataaaacaaggggaaacatggagtcgcgacgtatgttgtatgttgtagagtctagacaccgagtctactcccggggcttgtcctgactcctaagcctcaccgcacaggcaacaccgttattcgttcctatacttagtaacgtgtccacggattgtacaccgtaacctcatagtgcgtaagcgtgtccttaatctccacgggcgctagttcgttgtttcaattttcgccgatcctccacattattggaaaactacatatagcgtccttttctcgcttttctctttttctcttttctatctctacctctgtataccttcactctgaatacacgctacctccaacgtacaaccatacaacatattcatacccatacatatacataccaccaatacaaacatgttcaacttcaacttcttcaagtccgccccggccaacgagcccaccgctgaaagctggaatcccaacaccatcaccatgcagcccaccagccctgctcccccttcagccaaccaaaacgtcgtctttgaacagcctgtatgttgatatcccataactaaacaagcccatcccaaaacataaactaatatcgccttagaccagccaagaacaaatgcagctgcgcggtggtggcggtctctgctgcggattgtacgtttctcttctatccctactaataaaactccaaactaacttaacccagctgcgccggtctcgcttgcttcgagtgctgtgagatttgctgctagacgatggaataagatgagatcgggatgtggccgccgatgcgctcgtgcgacaacaatgttgatggactcggccttgttgggtccttaagcgcgtggcctcggcggtctttgatgtgatgcgatgcgatttgatgcgatttgatttgatggactccccccccccctccccccccnnnnnnnnnnnnnnnnnnnnnnnnnnnnnnnnnnnnnnnnnnnnnnnnnnnnnnnnnnnnnnnnnnnnnnnnnnnnnnnnnnnnnnnnnnnnnnnnnnnnnnnnnnnnnnnnnnnnnnnnnnnnnnnnnnnnnnnnnnnnnnnnnnnnnnnnnnnnnnnnnnnnnnnnnnnnnnnnnnnnnnnnnnnnnnnnnnnnnnnnnnnnnnnnnnnnnnnnnnnnnnnnnnnnnnnnnnnnnnnnnnnnnnnnnnnnnnnnnnnnnnnngtgggttttttgggttttgttttgtgtggggcccccccccccccccccctttttttttgcgctctactggatctttctacgctataccccagaacaatgccagttatggagttcaatttcagatttacggttcgatttgattttggtatatgtagatgatcgttctggtcatggctcgtggtgtagtcgttatatccatggaaggatgggtcgcttgttagtccgtgtgttggctaggtaaaggggcgacgggagaccgctgatcgcaatgccgcatcgacgtccgatactcggaaacccggtgcgcggccgaggattcggaggtttgcgagaagtactgggttcgtgtcagtgatattgaaaagacacagcaaacatatcgggtaactcacagtcaaagaaacactcaatgtccagagtatacgacgacgaggtcgaggatactgactccatattaccaggagagatcccaggcgaagcatagagactggaaacagtcgaccgatccggcgaaaagccatacaaagccccaaccagactctccggaacactgagcctcaatgccgacccatcaagcactacaccccgatgctctaaataaccctgcacatcatggcaatcaaaccactccccgtccagatccaacgagcgaatcctctcctcctcactcatctgcaccacccctccctccaaagcaacagcaacaggctccctctccccactccaatcctcatcccaatcctggatcccgccccgctgcaaaatccgcaccatccgccgcaggattttcccaggtctccggctattctccgggtcgacggggttcccatccccgtccctgcgcgggaagtgcttccccgcgccgccgagcgtgtagaacggcatcttggcgaattccagcacgctcccgatctcggattgcaccgtgcgtcggtaatggcggcggatgccggccatgtcgtggatgcagggcacgagcccgaaaacgcggcttagcaacgcgggctcggtgcgcgggtctgttagccagcggtaagtgtgctccaagctgaatctgtgcaggcggcgggagaggttggattcttggtggctgtatgtgtagattgttgctgttgggaggatgcggtttattagtggggatggggagcgggctcggttgtatgctgggtatgaagagggggtgccggggctcttctggggacgtgtataagatagttcgtagccgaatatggccttgtctcttgatggagcgttagtttgctggagttggagatcattgtcgttttcggatgtctgtcgggtcttgtttatttctgctagaatgagttctcgtgtgcgagcgagatagtccacgcttggctggagtgtcggttcttcgttgaggcgatcgactgcctcgtggtgggctccgcctaggagatttgatacattctctagtgtctgctctagtgcattgacgcgagatctgagagtctggatggtagtctcctttttgagacgataggtgcgttgtgcccgtcggatctgcagacggcgttcctgtggagctggtcaacggtgtctctatcgcaggcccattggatctacctcaatagcagtggcgtctttggcctgtgatcgcggccggcctctcttccgcacgggacgatccggaccagccgagattttatccgtcgcttggtcgggaatcttcggtggttgggctgctttcgttcggggtcttagccggctagacctggtgtttgttggagtttcctgttcttgtgacagttccaggtaggatcttgacgatagcgtgtccatcacgggtgcctatagttttgatttggaatatatctcgcagtcgaattgtccagatgatcagagaggaccgatatccaaaccctggatccagcctggaggttgacgttgattgcaattaattgatcactcatcctcgggaataacctcggccttaagccaacgctaatgcgcccacaggggttctccaccagccttgcagatatttgtttgcccatctccgacagagtgcaaagtaccctaaggctatgcacatcatctacagggatgttatgaaattatctcgagttgtgcacgtcgtcgacgtcacacggaaacccgttattttatttcgacacacagacctccatcgcttctcccggaccgcataacgtccggtgatacagtcagactccagaggaacctgaaatccgcggattttccttagggcctttccggtaacagtggagaataacacggtgactacaaggaccaaagacacaggtagcagctccgagatccagatcgtgctgaaattgtcagcgtggcgatcgaaaatgacatccaccacaactgcgattggctcttgacctttagctttgtgacgatcatgtcttattcttgccccggagggttttcctcatttatgcttcgacccgaggccgtgggattattataaaaccacttgatttctgcctggaacacctctgaaaatttctttcaaaccaaggccatggctctgtcgtttgtcttgggctttgcggccgcagccgttgtgctgcaggtcatccgcatggtattcaactcatggcagcactcacgacatgctaagagcttgggttgtggcagtgtgccaatgttcccgtctaaagatccttttggaatcgataacctgaaacagtccctggtagcagacaaggccaaagtagtacctcagttgtccgaggagcgggtcaagatcattagtgatcaggagaaacgcgatgtcactacattctccatctgcaacctcggtcgcacccacatctttactatcgaccctaagaacatccaggctgttctggctacacagttcaaggacttcgagcttggttctgtccgtcgaattagcttacatccgctactgggaagtggtattgtgagtacctgctgtacctcatttatcctatctgcaacccgtattgactgtctatagttcaccgccgatggagaggaatggagccgatcccgtagcctacttcgacctcagttcacccgcgagcagatcagtcaattggacttggaagaggagcatgtgcaaaaggccatgcaggctctgtccgtcgcggacaacggatggaccgccgctaccgacatccagactatcttcttccgcctgaccatcgactccgccacagaattcctattcggcgaaagtgtcgagagccagctcggcgctctaaacggcctgaacagacccgaagactccttcgccagctacttcgacaagtcccaatgggtctgcgcgcagcgaagccgcttcgagaaacttgccttcctcgccgagaacaaagaaaccaggttctccgacaagcaagtgcactccttcgtcgacaaagtcgtctcaaacgccctggcagcctcccaagccgaaaagaacgcctcgcccgagaaatcctcctacgtcttcctcgaagccctcctagaagtaacccgcgatccaatcgagctccgctcccaactccttaacatcctccttgccggccgcgacacaaccgcctccctcctaagctggacaaccctcatgctagcccaccacccagaggtcttctccaaactccgcgaaaccatcatctccaacttcggcacctactccaacccccagaacatcaccttcgccaacctgaaatcctgccagtacctgcagcacgtgatgaacgaagtgctacgcctgtaccccgtcgtccccttcaaccgccgcaacgcagtccgcgacacgaccatcccgcgcggcggcggtccgaacggccaggaccccgtgtacatccgcaagggccagtcggtgatctactcgacgcatgttatgcagcgccgtaaggacctgtggggccctgacgccgacgagttcaagcctgatcgctgggtaagccgccggcctgggtgggagtatatcccgttcaatggtgggccgcggatctgtattgggcagcagtttgcgctgactgaggctgggtatgttattgtgaggcttttgcagcgctttgatcgtattgagaatgtttatcccgatcagaagattcgctatggtcttactttgactagtgcgcctgctgatctggttactgtgcgcttgcaccaggctgaggatgcttgaggggatgttggttcgttgcctttttatctgtccctatggtatttttcttttcttcgtttctagggatggttgatggtgcttgtgttttctttctgcggttatttggtctagttgggttttgccggctaagactgagatcggcttgaaaatttgtatatatctcttccacactggctgagtcactctgagcggtttgtgcctatatgacgagaatgacatatttgcctaggtatgaatatagttcttattattttgaattgtgtttcctgttgcgtgtaatatgaggaaacaattggcactgggaagttcatcaaatcagatgcaaggttgatcttagcactgaccgcaagtaaagcaggttctatacctaggtataggaagaacacacacagtatttcaacacatcagaattgaatttagataataagatcgaagtaaatcgagaagaaagtaatgtaataaaatacatggagtatgaataacagtcaaccccgcaagaaaacgcttacaccaaaccaccagtcaaaaaatctccccttttggcttgatccacacgagatcatcccttaaagacactgggaatagtaagggttctgcttgacgcaagtggtgccgctctcgcaagcagtggcgccggtccagttgatgccaccgcactggtaatagtgcttagcaatgttcacagtagaggagccgctggtaggtacctgagcatatgccgtagcggtcgtggtggaggtggcggcggtggtggtcgaggtcacggtggaggtgagggtgacgagggtggacgggacgacaaccgtggtggtggtcgtgggagctgacgctgcgggagctgtggtggtcgaggaagacgaggtcaccgaggtggggacctgggcggcagcggtagtggtgctggacgtctgggcagcggtggtggtggatgtctgaacggcgttcttggtggatgtagatgtctgcgcagtggtagtagcggatgtctgagcggcggtcttagtagaggatgtctgggcagcggtggtggaggtggatgaagaagaggaagacgaggaggtcacggctgaggcagtgccgtccacgaagtacttctcgaggatgggcaggtaagtcgcgtaagcagggccattgctgggctccaagttgtacatgtaagatccccaccagggaccggcagaccaccacgaggcgccgacccagacgtcgctgttgtcggacatgtaggagagcatgccctcgacggcagtctcgcagtcgctgttgacgccaccggcgaactcgccgatgaagcccttcttgttgttgtcctgcaaccaggtggtggcggactcgagacgctccttaccgatggtggtgctgacacaggtctcggaggtaccggagctgtcgctgtccaggtactggtgcatctcgtagacgatcttgtccgcggagtcggtaagggccttcaggttgtcgttggtggcgacccaggaataggcgccgctccatgcgttaccttcaacgaagatgtactggctggtggcaccagcggcacggatagcgttaatagcggcctggttcaggtccagaacgagagtctgatcaaggccgtggtactcgttgtctaaatgatattagtggattattaccatggtatgggtgcctctaggtgacttactggtatcgaagatgaccttctcgttagtggcgaactcagcagcaacggtcttccagaaggcgccgaaatcagaggtcgaggtgatgatattgccagagctgtaaatgagcaattagtatcatacatcacggtgggttctagtttgatacacttactatcttccgtagttgtgggggtcaatgatggcataggcaccgctgtcggtaatgaactggacagtctacataatagaactgttagatctggaagagaatcaactacgacagacatcacgtacagtcttaagagcggccaggtaagtagcatccgcggtgccggtcatgctggatggcaccaggcgctccatcaagaagggcacacggaagatgttcatgcccgcatctcgcaggatctgaatctgatcagtcttgggccaggtgtagtctgtgttcagagtaccggggatgctgcccgaggcaaattcagcaccggactcgttcacgccgacccaagtgaatccattggcgcgcttcttgatattagcgctctgcctggtaggaacaacgtctcttgttcgggggtatgcgcaggccacagttgcggcgctggcagccaggacaatgttagtgaacttcattgtaggttgggaaatgtaaaagagagtgagtgtcgagtttgacggtaaagaatgtgaatagaagtaaaagaatgaaaatcaagagaccagtcttgaagcttgaatgaaagataatgaatgtactgcacgaagcaagggtgaaactcgtgggggtcgtctgttatatagccataacctgctcgggggcgtcaaatggcgctttgtgtacaaagatactaacaggcattctagagtggattcattcttcggcttaattagaccgtgataccggaagcgctaaccctgagggctgcaggagatgtctgttctgaacggcgggtctctccaccaaagtggccggataatttctcagaagccactagttcgagcacaagggaccaggagcgatccataaggcatttcgatgttatccataatcaacccaatctgtcgggaattggcaggcaacgcctaaccgcataggattgcacggagtatgtggaggcgggatcactaaagggcgcaaagtcggatcggcttccatttcgcttagactcgtctccccctcgaaagagagtgcaattaaaacgagacagttctgatacacttccggattagctaacccgccttgagcgtagtggcggaaaataaggcgccggataaaatgagggctgcctcaagatgaaacagacaccatgtggtaatttgggttgaccctgagatccccggtataatttgcccggaagctccttagcggagaggctaagaagcgaagctcatatatcgaagcgagactatccacatttcggtagtcgcggacacgactacccggacaagatatgttggtgttgtatgttgtatgttgtgttgtctgctcactcctgtcgatgctaatataaccgtcgtcacgtagtactataactagcttttcaaccgtactttgcagccgcctctaatctcttatggtttagacttggatgcaaataaattagacctgatgttccaatttattttctaattcatcaggaaagttacaggagttatgctcttttgtgaccagcagtgccggcagtatataaggggtacccttggcgaaaaccaactgtacatgttaagatgagatcgatcgtcgagaacgtttcatacttcgatccaattgatagaaatcgagtgaattgtaccatttcatctccgtgcacgtatctcaggcaaaaaagggtcccaaatatgtcagtagaaacaacatataaagtagtcaatgtataaaaaggcagggacaatgtattgatctttaatgctctatttgactgctatctttttttccctctcctatgaaacgagagggtacaaagtcagaggctatcaagaggagccctacgattcgaaatgttcgcgttacatgggattcgaacaccaacacgtgggcacgtgacttcccaaaagcgtaattctacgagagaatggtagaaacgcgcgcaccctgtagccctaataaaggatctgtaaaagaaaaaaaaaataggtagcttctctttgattgagcgtgtcatccttagtgcaggggccatgctaatcttctctgtatattttcatttgaccatatgccccgaagggcgaatagatatccttaaagttcaatataacctccattttgggcaaaaaactaccgcctacttattttgtcaaagcatcctacaggctttgattggatggctacaggtggcttgtcacgtgaaatggtaggctcggattgcatccattagttaatgagttaagtgattaccgatgagttatgaggtctaagcatgtccccaagcatagacgaagctactctgtgatgttaaattcaaatgaataatcaccttgaccgatcggcacaggcttcgcgtcattgtcatacagcgtcctttcaaaatatcgcacccgtccatccggtcgtgccaggagaacagtttgtttctgtgtcccgtatgatccacaggtaaaactctggttcggggccccatttgccggggtgtagatctcatcctgtacctgcgctgcagcgatatcctctgcatcttgatcaggatcatttggagtaccgatgcgcggaacgaagatggtcttgtgcagatgttgaatgtatgtctcaattgtggcctccttctctggcagtcgtggcaggcgatcagtgctgaggacctgcagcagacgatcaatcaatgcatcctcgtcctccgcgtctcccttttgcacatgctcattaatagcagcctccatcaactgctctccattaataatcttgggccaggatctgtcatcaaagcttgtgttgctgagcccacgtgtctggttcttctccgttgccacccaagtgatctgatccatgtctgtggaacggttggagacaatggccaagggctcgttgatacgtccacacaccagactgaaaccccccacctgtcttacttctgggttggccacgatgctttgcacaaactcttcggtatcatcccgcttgtcggtggacccgatcaaccagttgttgacgatggcgccccggctgtagattccgatggctgcgctggtggagtcctcacggtagttggtaagaactgccacctttccctgcctggtgacccccatccaagtgccttgtgtaggtcgggctaggtctcgtgagccgaggacatgtgaggatggccttagccaccagcctggcgaagatgttggacgatggaggaattcctatatatggtaagcttgtggttcaccgcttagagtggcaatacttacatctctgttgttgattatgatcaacgagtatttcgggtgggaagttgagattaatgcgatacacatagtttgagtttccgaggtcctagttgaacgggcggggaaaagaggattcacgaatttaacaacggtgtgtataagatggagtagaagcaaaggttctagcgaaacaggaaatcctggaagagaaagaggaacgggccataacacgtaggaactaaggcatctcgggtgattgggccactcgttgcttgtgcctcgggcttgtccctcgtgtagcgtatgcacctaagtcttggagtcttaaaaagccctcaaatatggcaagatatatattgtctcaaaacacatgaatgactgaattattatggcacctcaaaagcaaaaagtgtttcgcgtgacgtcaacacacatccgttgattcttggggaaatgcaagcggtcacgtctgtcatggagttatcgtgaagtgatttgcgcgtactattaatatagttatagttatagttattcttctttgattctgctttcaagcatcggataccctaaattatctttgttgccttattctcctcttttttgtccgacttcaggcgttagtctcagatcagcggggctgaagacttaaatatccccagtgactttcttttttcacatcttcaattcacccaggcttcatcatgtttggaatctttgcggacttattgtcgtaagttcaaagcatatacctcggaaagaagagatccgtaagctaacgcatagctatctgatagctcggtcatcacgatcctcttccccgtctttgcttcctacaaggctctccgttcctctgacccctcgcaactcgcaccatggctgatgtactgggtggtgctctcagtcattctgctggctgaatcctggacattttttattattggatggtatagttcaaccccgctccggctcaagatcacaagctaatgactcaattatctaggttcccattctacagctggatccgcctcggtttcatgtcttatctcgttcttccccagacgcaaggggctcgcttactgtaccaagactacgtggatccgttcttgacacaccatgagcgggggatcgaagagatgatcggccgcacccatgagcgggccaaggcactgggtcttcaatacttctacaaggccatcgactttgtccggcagagggtcctgggtctacctccgcagcgcccgacaccccctcagccaggtgccgcttcctacgcgcagtcgctactatcgcggttcaacatccccgtcgcaggaggagctggggcgcccgccaacacaactgattggtactctcttttcagtgcggctgtgggctcagttaccactggcaagtctcgggaagtgcgggatgaggagctttccgccagtggcactctcctccagcgccagctgcagtctatgtctggaaccgagaaggctcaatttatttcctcgcagcgagaggtgctagattaccttcggtcaactctaacacaagaggagcagagcactcctcgtggtgggctcgaggctgatgaccttgcctatggcgtgccgttgcgcaagaatcgcagcgaaaactccttcgaggttgttgatgcggatctaggaagtcgcccggaacaaaagactagtggatggacatctggttggttcggcaacgagcaagattcctcgggctcatctggtactgacttcgctgcacgggctgtcgatgagattgcccgatcgcgcacaaccgggcacgaccgatcttgagagtctgaccgcggagaatgtcccgcttttcaacaggggtccagatagaataagaaaaccaaaatagaacttgaacactttgctcttgctgagagatagggatgggagacatgatagatgtttccgggttgttttctgccttgctaaaaaatagttgaattgaaacttgaatcgaaagctcaaataccactaagaacagccgaggatgtcaagccgaatccctccggtcggaggaatagccttgcatggaagagttcacgcagatgcactgcaaggacggggacggggagacggggaagtatttgatatatccctatgcttggtgtgttgagtcaggggtgcataggaataagataggagatctaataggatctgcgagatatacagagcatagtccgttatgtatctaaagtaccttgtatagttcgatgtagatgtacttcgtcgatgtagatataggatgggtcaatagtggcaaatggggcagatggggcagatgggggcatgtagagggtccagaggaagaaagaaacacccagagtcattcacgagaagagtcatgtctagtattgaaccctatagcccatatgatatgcgttgaggccgtgtagatactatctatactcatgtactaacccatgtagatctctttgtaacatgtgggtggcgttgtagacgttattctcgaccttttccacattgctctcacttttcttttgaacatttcatcaagaccttttttctagagattctcacgagaatccatcccataaaacacattcacatccaaaggtacgttggtcgagccgggacgcactctcgttctgccctttcgttttccacaaacccgaatatttttttcccgtgaattttttccctcccaccaaccttctaccctttgaaataaccctttaacacataacactgtcgaccaaaacgctgctcttgctgcgtacctggtcttctgtgtcactggaaactcgctttccttatttcaaatcaagtttcatccctttaacaacctgcagctaggtttggatgtggccttgttacgcctccgcgtactgacatcacctcgtctttttttctctctctcacctgcctccatcgcccttttcgccctctccgcgcgtttagacgtacaacctgtctaatgagctcgaaccctcctcagtcgggcaaccaaggacaaagcaccgctactcccgtcgcttcgacccagcccgcatcctctacccccctggctgcccaggcgccagccagatcttacgccaacgcaactaagaagtccgcgacggactcaaccgccgtacccgtcaccgtgggcggttcagcgcaacatgggcagtcgagctccgtatctgtgaacggcaaacccatgcaaaagcaatctcaacagtctgcctcttctggcgtgaccatcgtcaatggagccccctctgcttcggctgcttcctccggggaccactctcgcaagccatctgtgaccatcacctcgagcgggacctccggctacatgcccaacggcggtggcccggccagtcggcccaacagccttcagttcggattccagcagagttctcccaacatgggtgctcccgctgtgcccgcctccaaccagcaagctggacttggtgctccttccacaaacccgcggattacgtctcctcagacttctccctcgcctattccccagcccgcatccagcggcggccgcccacctccatcgacttaccaggcacaaggaaatgtgcccaacttcggtagcttcggagaatcggctgatgctaacgtaagtgtctctgctccttccctcttgagtgatcccggtgtacacagcgtgacaccacccgtgcgcgaccttttcaagtccttgttttcgtgttttcgacctggttttgctcacatagatgtgttcgatttcacaggcacacggtgctcagcacttgcgtcgcgagtcctcccaatccacccacagcgatatgagcaaccacatgggcaaccgctcaagctaccaaggcggtcgcggtcgcggatactcccagcccggctaccagggacagcagatgccctactcccctaaccccggtttccgacagacccccaatcagccgcgaggcggtcctaacatgggtccccagtttcacggctcgaaccagggccgtcctttggccccctacccgaactcgcctcaccaagccaaccgcagccctgccttggccaatgttaaccctaccactccccagatgaaccaggttccgatggcacacccccagatgcctcagcaaccgtatggttacggtcaacacatgggcccccaagctgtgagatcccccccttctcgttcttcccaggacccctggcgtcgtccccaaaggaacctttccagctcttggaggcgcaaagacaaccctacatactctcccgagtgccccgtggaccttgcgcctgaaagtggccagttcgaacagattctaacattggtcaaatttcaacagtcattccccaacacatacgatcccaactacgctggttactacaacccgaatggtggttactacatgggacccccgtccccccaacctcgtactgccggcatgccctacaatcctcagtacatgggacaacagttccctaaccccatgcctcaggcgacgccactttcgcgtaccccctctcaagtatctactgatcgtccaggttcgagcctcggtcagggaccggcagccactggccctgctgtcgccggccacacccacactggcagccgcgcatccaacagccccgctcccaagcctcacttcattattccctcggcgaagaagagcccaatcatcatcaaggaccctaacagcggctcagtcaagaccttcgaaaagaaccccgcctcccctgctcgtgccaccccttcgcccgtgaagctcactcctcctacatccaccccccctcctcgcactggcagcgcgtctgagcacactcgtaccgagaacaaggtgaagaccgatgaagagaagaagcaagagttgaaggatgccgttcgcctgaagatccagcaggacgaagctgctcaaaagcagcgtctggctgatgaggcttctcgcaagaccgctgaagctgcgccggctgctgccaagaaggatgatactgaatctgcccgggctgctattgaagatcttagcattaaagataaggccgctcccgtcgaggaacccaagaaggtggaggctgctacagaatcaaaggctgctgcccctgctgaagagcccaagaaggctcctgctcctgcccctgcccctgcccctgcccctgcccctgcggatgatgatgagatcgactttgatgccatcgagcgtgaaatggccgagattgaagccaaggagcgcgccgccgaggaagactacaaccgcgcaaagcaagctaaaaaggaagaagccgaacgcaaggagcgtgaggaacttgagaactacgaggccaacatgaagaaggccgaagctgaggccgaggctcgcgaggttgcccgcgagaacgccgcccgtgtcggtggtgaagcggccgccaaggaagacgccaaggatgcgtttgcctcgctcaagaagggtggctacactgccactgagtcttctacgcctgccgacagcggtgctgccactcctgtttcgtccgacatgggtcccccagccaagcctgccagtgctattcctaagaagcccgttggtctcaagcttgatacccccaagcccaccgagcccctgcaagcaaccgcaggcatgaagtctttgcagaatgccaagttcctgaaagacctcagcaagatcacttacccctcgtccatcacccctcccagcgccgctatgaacgctgctgcgcccgaaggccgcaagttccactacgaccgggacttcctgctgcaattccaggccgcctttaaggacaagatttccttagattgggacgcccgtctgcgggacacagtcggtgacccatctggatcccagtctgcccgcactcctggcttaggtagccgcggtccctctcgcaacggcaccatgggtcctactaccttccccgtcatgggcaacttcaacacaggccgacctggccagatgcccgctatgggcagcggatcactgaccggccgcagcgcgtccgcctttccatttggacggggcggcggtcctggtagcatggctattggaaacattcgccaaaactctgccggtgttcctcctcgtggcaactcaagcaagggtccccgcaacgacagccgacagaataagaataagcacggcggccgacaggatgaggcacaaaacaaatcgatgcctcttaccgctggcatggatctgaaggctattcaaaccaccgcgactggctggaagcctcgcagtgttggccaaaacgctggcgctggtcccgcccctggtggtgacggctacttggcaccggatgtcgtgcagcgcaaggtcaaggctgctcttaacaagatgaccccggagaagtttgaccgtatctctggtcagatcctcgagattgtttcccagtccaaggatgagtccgacggccgcaccctgcgccaggtcatccaactcacatttgagaaggctactgatgaggctcactgggctcccatgtacgccaagttctgtaagagcatgctggagagcatgagcccagaaattaaggatgagaacattcgtgacagaaatggcacagtcgttgctggtggaagtttgttccgcaagtacctgctcaaccgctgccaagaagagttcgagcgtggctggaagactaacctgcctaacaagcctgagggcactactgaagaggtatgtcgttctacatctcaacgttatttttcccgtatactaataaccgaccacaggttgcaatgatgtctgaagaatactacatcgctgccgccgctaagcgtcgtggtcttggtctcgtcaagttcattggtgaactttacaagcttggcatgcttacagagcgtatcatgcacgagtgtgttaagaagcttgtggactatgagggtattcccgatgaagccgaggtcgagagtttgaccagtctgctgcgcaccatcggtgccagcctcgatgcctctgagaagggtcctgccatgatggacgcctactttactcgtatcaacctgatggttgagacacctaatctgcccagccgtcttcgtttcatgcttctagtaagtttatctctatctcttcgtcttatgagggggaaatagaagactaacatggttcttaggatattattgatctgcgtgccgcacgctggaactctaaggatgccgataagggtcctcagaccattgttgagatccgtgaggctgtaagtaacctttattgctatgttccaatgtctctcgctaactcttgaaacaggctgcccgtgcccagcaagctgctgaagctgagcgccagcgccagtccagcaaccgtggaggcggtggccgcatccccatgggtcgcggtgacgcccgcggtttcggatacggaaaccaagcccctcctcccgattatgcctctagcaaggttggcaccgacgatctccgccgcctgcgttcgactcgcaacaccaaccagcctatgtcattcggtccatccagcctactcggctcgcgtaccaacagcggccgcaagaacctcggtcccggtggtagcctggtccgtggtagtgacgacagcgctgccagcagccgcaacggcactagcggcagcaagaaggaagacaactcttctatgaatgctttcaggtatgcaacccctaacccttccctgcaaaaatcctcatgctaataccctttccagtgcgcttgctgcccttgaagatcgggataacatggctacctcgccaccgtcaaaccctgcatccccgatgctcactaagtcgcagcccgcggcagcggagcgtcgtccctcaaaaaccccgtctgtcaaggacggagaatccacagcatagagagtccttaggagttaatgatcaacgctttccattttcttggttcacaaaaagatttcctcattttcgtcatgtccatcttgttctttccccgtgagggaagccatgcgcctttgttcttaatcggtcacagtcctcgctttgcattttccgactggtcggttatcccctaggacttgtttttcacgctttatcacggccggtttttacttttttgaacttctttcgaaaaagagacccaattcatagtgtacaatcttgacatctttttcaattcttattcttgtttcttattcttgctttctccttcttttctttccattgaatcgagagatgggtgtggtccgtggggctgtgcttgagagtaggactttgctttgcaattggacttgctcaatcacttctatttcataattcttgtctttcttttgttccccatatgcaactcgcgtaggggtgggaactgacaagagattgatgatgacagtgatgaaggggttgctgtgttgctctcttttcctcttcctcctttcttgtgctttgcatattctcttcgctcttgttatttgctcttgcactttgcttgtccttgtcctcgtccttttttcccaatacccggagctccactcaactttagtgtaattgaatgaatgcttcgccttctggctctttctaatctcttcctttatgactattgagctactcgtagagttctgtattagacgtgactatagacttggaattttcaacaaacaatatagcatggatcggtgcctatacttacttgggtatactacgatgagaatagtcggccgcttatgttgttggtgtctttatgtctttatcaacaattctcccgtgttggtattgtagaaggataagaagaagaatcatccgcaaagaatagaatatccgcagtgaacaaagtgtaaagtatgaatattgactacgagtacacaggtagtttacaagaaatctgcacatctatgggattaagcaatcaatgtctatgcatccatttagcgaattcaggctgtaggcacaagagggagagaaatccacatggccagaacatgtgccctgtctaaccaggtcggaacatatcttaaaaaccataagtgatgagggtattgagctgaggtataactgtcagtcccgtcgcgagccgacgtggttcctgacgttcattattctgttcgagagagaggcgctagaagtagcaagggatggttcgtatgcatcgtgggtatctgagaaagcgcgatgatgtaatgtatggcgccaacacgagcgaaatgggagaaatggggataaagagccgccgcggagcaagcaatgctgtcaggattcagatcccttcttgttgtcgtcttcatcgttgttctctgacacttcaatcatcgggattgacacgggattcttgcttgaatcggaaggctcatcctcctctggcttgtcagcctcgggagcggggtctggcacaggagactcgagttgatcggatggagtaggtgaggccacggtgctctctagcaaaggagatggctgggcactactgccagcaatgacgctctcctgggagctatctgctgaacttgcaacacccggactcgccataaccactgcatccagtgagttccgaataggataagttgagtcggagtcatcgtggctaacgctactacggtctgagaccgacaaagaactgcgcgaggccgtattcgagtatgatgcagggagtccgagtgcctctgccactgctgcctcctcgtctggcagcttcgaagtgctgctatcgttgctagcactggcgccgaatatctgactgccgcgctgttcgctcatttccaggatatggttgtagctgcgtcgtgttgggtctgcacggcgctttttcttcttcttttcgcgcttcgttgaaggccgaacgactatcaccgggatgggggattgctggagacagtatttggagacggagcctgggagcagactgtgcactcctttcaagttgcgtcctcgtgtaccgacgacaagcattgcaggctcgtatatgcggatctagagattgttagattgttaggaggcaacaacggggttcttggaagcttaccatgcgttggaggatgctctcaaccttgcccacggcaagttccaggaccaaactgatggccttctcattctggctgttcttccgaatcacctgctcaaatagcttctcggcctcttcgcggtactttcgctcttcgattccagcgtcgctggctatgctcgagtccttctccaccgcccgaagacagacgatctcgtcgccgtcatccaccagctcgtcaatgagccattcgagggcgaactcggagtagtcgttctggtccgttccgcacaaaaaggtcctgctacgacgcgtgcactggtagcctttgtgtttgtagtttaatgtgagggagaagtcggtcgcatcgaaattgtcgaacgtgtcaaaagagacgcctcgctcgtaggttctgccatacattagtacaggccatttcagtgtctttgaggggagcatacttcggtggcggtggagacggccctcgattcaattgggcagctttatgttcgcgttccttttcctccaatagttccctcgacggggtatccccgtatgacagtcgcttctccttgaagctcgacgggcgactaggcaactgagcctctgcaatgctaaactggatcgatctccgttggttcttgggcttatcctcactagagaggccacgggtgtgaccagacccagctgagatcgtatgatctccgagttcaggtcgctctacagactcagatgagactgtaggagaagttggcgcagacatcaggaagttgatctttggtgatgtaaaggaacaggggtataataggtctgtctattggtttgcgtgggtcgtgtgttgacgtaaatgacgaaagaccagtacgtatcagcggccgcgcggttgttgggggttccacaggaccaagcagggttttgggatcatgttttggagttcttgcaatataaattaggaaggttgatcatcacgagtcatcgtgctcgcgcggaatgacggatgcagcgaggggtcaaccgtcagggcggttcagggcggtgatcatttatcgatagcgggagccctgcccgcgagcttcattgtgcttatgtaatgccagcttgggtccacacaggcacgtgtccacgggtccggtgattgacataaccctataatgactgaagcttcatttgtgttaactacgtggggatgccaaagaggcgatatttagtgcccagtatttctttccaaagcctcagctgtcgagtagagcttgaagaaaacttgtccacgtgtttataaagggaaattctcaatcgcggcagctttaacaatctgtatgattctcagctgttttacgattggagatgatttctgggggttttgactcttgtgacatgatgagcgtgccatgaacctttttgctttctttttttcttcagagctaaggttgtttcacatgagaaagggatggccgcaacacaaacaaagaccaatggttcgttatatcattgggaagcatgataaagttcagagttgaagtgagcaatatatgtagctgaatgatctaaataatccgaactacaatggtatcaatctaattttccgtgctccgtacaaagaccagatctgttagggcataaagataaaggaccaacctactatattaagtaaattccatagcaatcatactccatacgtgatataccccattcccgccacccgtagacttccaaggtcctgatacgaaagctgactaatttcaatctcagggtcttaccagcacctaaactgccagataacggaaagtgctgccagataggggaagaagatctattgagcgcccaaccaataaaagcgcccaacagcggagcatacccgaaacacccccagcctcaagattcccacccactagcccaatctgactccccctgccttacctctaacaaagccaagggacccattcgaagcaaaaagaagcgatggaaaaaaaaaaacgagacaagacccagccccttcgtaacccactcccgtggagaacatggcctgaataatgagctagtaaaatccttcagctgactagcaacctgtcgcagcgccctatgccgacctagccgcgatgatctcacgtcttggctctgatctatctctcttatccggcggtgaagatcatggcgtgctggccggctgccacttctatttggctggaaacggattcggcgcgctcggggcgtggatcgacgtggtcacatgcgcgattctgccggttttggggatttgctgtgctacgacgaaggtacgcaatatggagattaagggagtacgtggaactggtacgtggaaaatgttgaggattttggaatttttattggattattttttttttttttgtgggggaagtgaagacacttggtttgtgtgtacattggttgggctcacaatggcttcccccgtgtttcaacgatccaatgcagtctcgacctttccagggagagctggaggttgggccactatcacagatagctggggatgtaagaaaaatataataaatgtccatgtgacatacaatgagatgtccaaagatggagattcgccaaaacgcgaccgacagaaaacgccagaaaatagaaaatagatgagatgtcaattataaattcgctccaaaaagtatcgtcatagaaagcatcagggtatcacgtatgtatcgctggatgatggtacacaaggcagagagaggggtagagatgagagtataagtcggggtcgtaacggagtggatatatgagggatcgagcttattcaataagcctcgatgatggtctgctcttgtgcaccaaaataccccccctgctcaaagagatggggttgatcggaattcgccaaggtaatagccgtagtagtaggctccttttcatgaaacgactccagcgtcggctggnnnnnnnnnnnnnnnnnnnnnnnnnnnnnnnnnnnnnnnnnnnnnnnnnnnnnnnnnnnnnnnnnnnnnnnnnnnnnnnnnnnnnnnnnnnnnnnnnnnnnnnnnnnnnnnnnnnnnnnnnnnnnnnnnnnnnnnnnnnnnnnnnnnnnnnnnnnnnnnnnnnnnnnnnnnnnnnnnnnnnnnnnnnnnnnnnnnnnnnnngcgggcgggggcggggaaggcggcgtcgcctcgtcctcggagtctccatccaagtcaacgaggagctcgggtggtgactgtcgggatgacgagcgagtcaagctcagctcgtccgaatcatctgcttcgtcgtactcaaagtctgagtctgtgtcatcgtcgtcgtcatcctcctctaggaggtcctcgaagtgagccacgggcgatggggcgcggcggcggggaggagtgttgatgatgaactcggactcgtcgtagtcggagtcgtcgctgagttcagagtccacatcggacgcatcctccggatcccagtcctcctcgggctcttcgaccacggtcgaggcccactggacatgttgccgagaggaaggagcaggggcagaagccttggtggctccgttgacggtctggttgaaccagcgttcttgttcacgctcagcgtcggcgagatcgtacattagtgagtcgaggaggttggcgtggccgacaagcagacgcaggtcgtggtccgcccgggaagcttcacgggtgagcttcttccgggcggtgtgagcaaggtagtatgtttgagtgatgctcattttcttatcttgacggcgacggaggagagaatcgaagtagggtgaggattcggaggatgggctgggggatttggaggtagaagaagagtccatggtgggccagacgagctttttcagggatattgggtatgactctttggtggtgactcaattaggcgtcatccagtcacagtggatcgttttgaggcggtgtgatataagggagaaagtcggtgttagattggattcggtatacatgaaagtatagacaggtcgagttgtgatttccaagggggaccagatcgatagtgtagcgggtttaaaaagggaatctcagatatcagaaacacctggacaagaggtttatatttaatctgacaaggcagcgttttctttttttcttttatttttttttagtccgatcgacccgatcgacccgaaacggactttacggatgacgagagatccaccggaaataaatggagaaaaggtatacgccgagcccgagtaaatgagtaatgcactggtcgcttccaaggttccctgggatttctagatcctcaccgctacgttacactttgtacgtatactttagatattgacagtaaatattgattagtattccgtgcttataattcaattcaaatctaattaactacgaaagttaatacagtgagtcatctaaagcggcactcggatggccaatacgccgttctggtccgcatcggaggatgaaaaaaccgatcggagtttcggtcgcacgtctgccgtttatttgatttgaattcttttccttaattcctaattcctaattcctaattccattatttcctattcgggctatatgtacctctgcgacctagtttaccaggtactctgttgattactgatataacaacaaggttcccatgatccttggaactcatatttgtattacagagcattcgatttctaatcctagcacgccaaatcatatcatcttcgatacgatctgacaattgctgacaattgctttgaccccgcgacgtgtcaacatcctatctagcatggaggctcttggaaccttggaagccaagccacattgctccgtatgcgtatcctgtgttatgcaacactacccctcgcctgtgttctgtccccctagacgagtacgacatgtgcccagccttggcaggatggagtagcattccccaggaattcgtgattgaccaggaatccatgtccgaggaggtacggagtacggagtagggctgtggggaacacacaggaggttctgactaatgattggcaagaattggcgcatctcattggtccccacacgaaatctgctcaccctgcgccctgcaaggagggggtgagattaggtgtttctcgcctcgcgatacaggcacaatgtacattccttactccgtccagcatacttggccctcatagcgtgtttggcgtatcgcacagactccaaccctgccaaggtaaggccctgtttttcagatggcagccttgggcttgtccaggcaggcgatcttggcggcttaggtaagatccatgcggatatcaccgagccaagatccgaatccacggatgcggctttctgatgacataagcactcaaatgccacctggcctggtggttcgctcgcagagcttacccttttaatctccacttgatatagccctacggactagccgaatacgaagatcccaatacatattgatctggcctgattgtttcattttaactctaggctgctcttatgtcttaggctaccatatcatgcaatcttttctcgattttccatcaatatcaatctactctgaaaattacccaattaggaaatggtgaggtcaacaggtcgatccagccacaggccagaacaattcaattcaaggtctatgttgtggggatggatcggagatcaatacaatagtcatcatcatacttttacttttattgaaacgccaataatcgacagcggatcctcggctttttgttgattctccgagatccactgtgcttgacgagtatcagagtatgacatcaaggacttgggcttcggcaatttcttatctgttatttattgccgagagatgattctttgatgtgtattagaagtggattgccaattgtctaggcagttgatatggttgagatggttgagatgatgtggacgacaacacattacatgtacaacggcctgatataatagtcaccaatcaaagtctagataaccacctgcctaaaataggtgacgtgtatcttgcggctgataatgatatgcataacatacgtgtgtatgcacataatctcatcttaataaccaattcacaatttatgcacacaatctccattaataaccagtgcataaacataaaattatcccacctaattaggtaatgtccctcgcaagcccctccaaggctggaggcgaccaaattcctccgatcctcggcaaaactccatccgcccaggcaaactccgtatccgagttccgtcccaggggtggatcgtgcactgtgcacaccttctataacatgcttccccaatgcacgtcgccagttcacgctagagctctctggctttgctcacgtcggctatcaccttcattcacgggtgatcgacacgtgcaaaagacgcatgtgactcgatctcgggactccgttgccggtgccggaatggatcttcgtccaccgctagatcgaggtttgctggctatacggcacatggccacggggctggccggatggaatggtccgtgtggattcactacattttgtacggagtaactagctaactagaggtcctcgcctcgtgactcatggctttttttttcttctagtccgtcatgcaggtcgcttagcgtgttcctcgctgccatggggattctcgtttaagggtccattcgagctgagctgtcggccgctcggatatagctcgggctttgttagttagttatttaattaatcatttatgattgtgcgctctgatcatcttcagcttgtaagcacgtgaattctagaacaaaaaaacacatacatgtccggaaaaggaataggatagcgaggtgggtaaggccaaagtcagggaaacaaattttcagggcgagatggacgctttgatcaatctctggcctctttgtgcctgtggagacacccgtttatcctttgatgtagggcagtcatggcacgtgacagcgatctatatctacatagccaggtcctacgtgaacatgaataccataggtatacagattacagagcactaaagtagaagaaaaacattcattcgtgagaactgacgaataggtgatagtcaagtgacgcctaagcaacgcctaagcgtcgcttcagcaacgactggacgagacatccagcgctgcttcggcgacgcttagacgccgcttaggcgccacaggccacagactcgagccggactcgaaccggactccagcgagccccagcgcttgcacattcaacagcaaggcgcatcccaccctcgccttcaagccttccaggcttctcactccaggtacacattctggaccatctcattgccgagatgatcgataacagagaccgaattgacggggtccatgatccggagatcagcataagcgagggcccggtcaacggtggcgtcaacgttgtacaagtcgctggcgtagccatggaagcgaagcttgtgaatagcggccttgatccaggtgacgcagttctggacaggctcagcccccttaatgggcagggggacagaacgaagaaggatcttgatggagtcggggccgactccatcgttgacctcgccgattgccatgcggatcaggagagagtcgcaggaggccgggtgaacgttgttcttgacgcggtaggtccattgataatcggggttgaggtcgcgtcggtacactgggtcgggcgaggctccgtcagtcacgtcgaaggcgtagtagcggttgtttggtgcatcgaagaggaggatggcccagtggtaagcagagaagcctaggcgtcgtcggtattcgccaagagagagctcgcctcggtggtagactgccaggaagacttggtagactctggtacctgggggactcagaatcgcgccacgctcgacgggagcatcgctgaactatgtgggtgctcttgttagttgctattctgagcttcagttttgatggatcagactcacaggaagttcaattggaaacattgccatgttgctcagaatttgcacggttgtgtgggatgggagatggatgagggtttgtttactggcttttctcaggtcgagcacttgagcgggcacatgagcgagcacctgagcaggaacccctctcagcttttatttccctttctggctaccgcctgaatgccattgtcaattgcaattgaatcgtcggtgcctaaccaagatgtctatctgagaccgccagcctattgatgattgtggcgaccagaaacggggatttattcgattttatatcgcgggtttatagatatctgaagctatacaaatgccggcgcacggaccatccgatatagatcgaagcggcccgtccccttcgatccaaccataaaagaccgaagctacgaatagtaaattagaccaatttggtagtttgattgattaaaacaaatgagcgacatgtaaaatagttatgtttcaatctaaaatgcgcactagctctaggtatgtggtggataggaccatggtctgatatttgcgacaccctggcacaaacatacaatcacactttgggattgtataaatgctggcaactctggttattgaaaagaagataatcacttgtattctttcaaatgttctaaaaccatgcatatagtgaacgagcgacacacaatccttttgtgaatatcctaggtgaccaaaacacagatagaagttggctgaatatattctcatgtcgtagaacagtaacctatgtacattggtctattttttaaattcaataataggaatgcgataagactttctttcagaattaaggtaactttctcgataagacatgggccagtctcgggctacatatagaaaagtcgctggtccttcctatacatctaaaagacatctcgagagaatatccgaaaacacatcgaagtgtttttacacatatataggagatacctaggtcgctgagctgtacaaacaatctgctcaaccatctcattgatatagacataaagagcaaaaataacaaaagagtagtctggacatagaatcatagagaaatcccaatgtcacgcctgcctgaaataacttggtacttgatgtcaaagtgatcagtacccggttttcaaatctgttaaacagactctgcccttatccacctaaggcagagacaagaacaaattcttcaacttgggatagttaggtgtgcccaatccagtaacgggatcccatctgcatagtacgtcagtaaaaagcccacagccaatatataatattgtactcaccctggaatagcgctgaagccgtccgagtcacatccagcactggtgccgttggtgatatcgttaagaacctccgggtgagcatagagcacagggttcacgaaaccaacagggcgcttgcccctggcaagccgttcttcgttgatctaccaagagcagatccattagcacagtcgaaaaacaaattcaaattcccgacttaccaaattcagaaccgaagcgaacaatggcgaggccaaactagcgccatagaagtggtgcagcgctccattggtgtaagcagggaacaaggcaccattggccgacacatcgggataagcacggccaatacggttgtagagacccttggtcttgttaaggttgacttcgaactcggaatagtaggggtaagtcagcttggccttcttgaagtacttctccacggctttcctctggtacaagggctgcgggaagtagttggagaagccgcccgagctgctgaagttggcggcggtaccacccaagttagcgtgcatcacgctttcggcatcgttgacggtctggtccgcgtagagcatggtgcctccgacggaggtcacgtaggggcagttggaggggtattgggggttgaagatctttccctcgggtcccaggcatccattggcacttccgtcgccgtggaaggaggcgactccgtagtcgccagaggcgactccgtagtcgccagaggcgaataggatggagtggccctgcaggccgagcttcaggaactcattgcattggcgcttggtgtatgcgacggggagatcggcttcggcttgtccgtaggaggcgctgatgacgtttgtgggcttgtacacaccgcattgaagcttgcctgtcttgtgtgagccatcagatcagtccgtttggtggaaattgtatattacccttgtagccaccaggttggggattgggatagactgcgtcgatatcagggttgtcgcccttttcaccgaaggcactgtatgtgcagtaagactgaaattattagcaatatgcatttatcttcagcagaatatgacatacaccatcgagagcgtcaaggaaagtgttgaacaggttggtggtcgcaacctcttgcggttcatagatttggtcatcaacctggtaaagagtcacggactgggggtagataagggcataactggcgatattagcaaataacagagaagcaagtagaaaagaactgtacttacgccatgtcaatatcaatatccgattcaccagtattcagcgggctgtaatcaggcaccgagaagttggcaccatcaatcaaggcaggaatggggtaagtgccttgagggatccaaggagcataggctttgtagtacagatcaatatctgacttggcaaagtagtcaccctgctcgtagagaccaagcgagttgcccttctttgccttggtggcatttggaatcttgtacaaggccttgatgcaggctggagtcatattggttccgcatgtctggagatccgcaggaagtgacttcgccttctcggggataaccgtgtcgatagagtcatcaattcccacgggcgtgcccttggaatgaaccaaatgcgacgctcgcttctccttggtggtcttcttgacgatggggctgagcttgacacccggagtaatatagtcaatgtgtgcctggatatgttcagggacgtggtacctaacactgttaaaagagtccaagatggtcagaagcagcaaaactcactcctcacaaccaatcttgatgctggaactgctggcatgctcatgttcatagaactcagccttgaacagatcctccacttcatgcgcataggcatcaaaagccaaccatcccttgttatcggagtgtacaatccgggactcatgaatcccagaagcttcaagccagtgacgaacagattccacagaatcctttgaaggagcaaacaaaccatgaacttcctccgcagtccaatactgtccatatttgggggagctggggtcagaactatacaaatattagtgattaggatgtacaccatgaggacaagacacataaaacaacttacacagccatgagatactcatcacccttctccaaattattctgggtaagaccaatgcgcacaggcagcacagaatcacgcttaatgcgctcgcccttcacccaatccaaatgctcgcttcgcttctcatgcaagacatgcttcaccggtgctgggacggctccagaaagagccgcgatcgccagagcgacacaaacttggcgtacgagcatcttgaggaacaatggagctgtggtgatactcggctatctgggatggggagtttccccctgatatatagtacacacgggacagctaatcgcaatgttgtgattgcaaccctaatttccggactgcgatggcgaaaaaagcactaattaagattggcagatctgattggatatatcctctagtagctgcatgaagtttgagacaaaatccggaattcaaccggcactagagatcaatgcccctggcataacgacttcgatatctctgcgcgggatagcttaagagcgcaggtggtaatttatagctcttattctgccaatttctgatattattacttggtatttcttggtagtttcttggtgattccttagttattgcttggtcattgcttggtgtttttgtcttatctcaagaggggtgctaggctagttcgatgagaacggacgctacagcggagttccgacggagaaatccatcgatgtagcaacgattcatttggggctgaacctggcgagaagtcagagatccaatgggagaatatgtaaagtcgttcagaatttaggattcttcgtgaaaaagaaaacaacctcgattccgggcgtcaaaccatgcgacacgggccggggtcttagagtcgaaggaacttctcaggagttattgtaactgactactatgtgccatctgtattcaaaatatgtgtataaatttatctaaatcaaaaggaaaaacctgacatcatcatcatatcgaatatcaatcacagtggagaccacaagacggcgtctttttttttacgaggagaaaaaggaaaggggaatagagggggaaagacactagaaaaatctagtggtggaagagacggatgccctgctcgacgaaggtgatgcccagcttctcggcagtctcgaagacaggggtgtcgttctggctaccagtgggggcggcgatgtacttgacccctgagcgggcggcacggaagacattgtcgatgaaggggaactagtgatgacaattagcatttacgaaagagtgtgggcggacaaggggattacgtacgaaggcatcggacgagacagcgacctcgctgagcttctggagccaagcctcacgctcctcctgggtgaagggagcggggacttcctcgaagacacgctcgtactcggcggtctcggcctcggtgcggggggtctggcccgagcagagcaggtcaatggcgttggacttgtcagcacgcttggtgccctgcttccacttgataccgatgacgcgctcgtggaagcgcatccaccagttgtcggccttgtcgccggccagacgggtgcagtggatacggctctgctggccagcgcccaggccgatgatctggccgttcagggcgtagcagacggagttggactgggtgtacttgagggcaatggtggcgacggtcaagtcacggagagcagcctcggggagggaggtggtggtcttgggggtgatgatggtgttgaaggtcttgctgggggagatgacgacgtcgttgcgctgctgggtcaggtggacaccgtaaatagtgcgggtctcctcaggtgccggggtgtagtcctcgtccatctggaggacgaggtacttgccgcccttcttcttggagaggatggccagagcctcgggctggtagccgggagcgatgacaccgtcagacacctcacgcgagatgatcctggcggtagggacatcgacgatgtcactgagggcgagaaggtcaccgaagctggacatgcggtcggcaccacgggcacgagcgtaagcctgagccagaccggaggtctcgatatcctggatatcgtccaccatgtagaccttgcgctccttctcgttcaggggcacgccgatagcggcaccagcgggggaaacgtgcttgaagctggcagcggcggggaagccaagagcttgcttgagctccttaaccaaaggccaggcgttcagggcatcgagcaggttaacgtagccaggagctccattgaggaccttgaaaggtagctggccctgaaccatgtaggcagaggcgggcttctgatgggggttgataccgtagcgcagcgacagctgctgcgcaccgttgccagcatactccttgcggaaaaagcctgagatagcggtgtcataatcggcagtctgctcgaacgccttgagggcgtactgcttgcggctagcctcggtgatagcgccggcctcgagctccttgaggaaatcggagtagtcgagggggtctgacaggatggtcacacgcttgtggttcttggccgcagcgcggagcagagtcacaccaccaatatcaatttcctccacggcctcgtcgatggtgacgttgaccttggcgacggtctccttgaaggggtacaggttgcaaacgacgtagtcgaccttggagatcttctgctcggcgagatccttctcgtcggactcgatgtcacgggcgaggataccaccgtgcacagcggggtggagggtcttgacacggccgccgagcatctcgggggccttggtgatggcagagacatccctgggatcaatcgttagttcctgggctgggtattgatcctaacgcttcttcttatatttcgttgcgtcatcgatgacagaggcaactcactcgacagggaatccagcctcacggatcatcttagcggtaccgccagacgcgagaagacggacttcctgcttgaccagacccttggccaggtcaagcagaccagtcttgtcatagacggagatgatagctgttcaatcacaaaatcagaatattagaattgaccatgaactgcttggaataaataaatcatagtccggggaactatgaagccaagagtgacataccggtcttttgttgagacatgatggatcctacggtcgacactagatatgttagataaggaattcccaaatgcagcccgcaattgaagcaattgattgatatgaagactccaatgacatacctgaaaccaagcgaagagggtataacaaatgacgaacagaaagaaaagaagaaaatatgactcgcggggtcggaccgattgcggcggcggggcttgatagcaaaagttatattacgtgatcaaccacagcccactgtggcgcgacccaatcagagatcagtattatgtaggagaccttagcggcacacgtgacctgggaatacataagagatttctcagatgcgccatcttctccttctctttttcttcttcatgaacaacgcaaaactcacattctactcaaaaagcgttcctacgaagactcgtctgatgaagtacggaaatcgtatagagaatggagaccaagtgccaactggcgaaggtatcgatcttgggtgcagtgcctgcttgacctcggtcatgtagtagggattgcaatgattgattctacataccaatcggaaataataaatataattgatattctttttgaaaacctcgcttcttataatctttgtaggtttcatcagagttctttgatatacggagtaaagtagtcttctgcgtagcaaaaattcggcgtagccgagttctattacaattctttatcagagccatgaattatttcgaatgtacattaaacgttccctatccttcatgaggccgttcccagcaaagctcgagtcctcaatcatgaaccaggaaaactcgggcgtttttgagcctcacgacttcataacgtttttgacgcgagctccgatggcaagctgacggccaacatttccaaagcacacgcacgcgcagaaaatgacactggcaatccaagtgccgaccgcgaagctctcctgtgtgcaaccgaaatctggacccagcacatgctctagtcctgttccattcagaatgctggtgcggaatgggccggtcgacgcaggcacaagctctggcttaaggccaaggaccacccccatgccggccaagccaacggtggttgagaggacgaagccggtcgtggtgcggtcaatcaggtaccagagaacgggattcacgagcgcgagggttagcgatgcttgtgtggtagattcccaagggagtctccgctgtaaagaaaaaagagaagtcagccttgtcatatagcaatggagcaaaaaagaaagaatccacttaccatggcaaatgcaattccaacaaacgctccaacactgcgagcaacagcaacccaagccggggtgcgatccccactttcgtcctcatcggtactcgcaagctcggaatcagactcgacctcaccatccagccaaggaagcaggttaccgagaacaacaccagccaacccccaggagaccaagtattgcgacaagtcgtagtaatgaatattctccagcttgacaggcgtaatccaatggttatcatgaagataaacagtgatcacaccgtaagcaagaccaaagccaaagagcagcacgctgctcagtgcctgcggcaagatcacgccccggaacattccatggctcagacgagaccgagtcctccgcagcgacatctgccgcggttcaatggccgatttctctgcttcgcgctgcgactgctcgggcgggaactctgactccggactgttggcttccgtgccccaggggctagactcgtcgcggtccgccccgtcaaatgctgtcggggagtagatcccgtacagcgtcgaggaggtcaggttcatcactgatcctgtgcggctcacgctcgttgagttggacgcggcttctgcttgcgggttcaggtactctggctcgatcggtgttgggggaccggacgactccgtggaagcgggcgtcagatcgaatggtcgtctcgggcgcggacgcaggatgcgagggtgttcgttcatgatggctaaatgtatttgtgtgttgatttcaaagctccttaaattttccggggaccagatgatcgccggcgcgacaaaaaaaacttgtgttttatttgtcccacacgtttagatgatccaagctctgtaagtcgagctgtaatagatggcacaagatgatctgtgactgggaatgtgttaagcgaaatgtcaaagtatggggaaaggagaaaatcgaaaatggagactgggggagcttagcgggacatgacgcttaccggaaatataaacttcctcgaagcaacaagggtcagcttgctatttatctcagggttctgggatttccgaggttaaatgaggtcggttcaggttggggagaagaggaaaagtgtaagcgtaaaggatctcaacaaattatgtacccttaggaatccgcctcgtattgttggccgcaccgctctgtagcaattcgtatccactcggacaccggactcccgttactcgtatgatctgctgaaatttctctgggatttctatagaagtggacagatgtacggagcatgaaaaggggagaaagaggggaattatcacatgcaatgcacgtcggatgtcaaggtagtactcgccacttatgtcaagggcttgggtggaagtgacttgaaatacaaccattccggaagagaatggtacgcctagaacataggagaaagacaaaagaaagagtagatcgtgatacacaagatttcaaaaacaaaacgccaacccattagtcttccatcgcgtcgtctccataacctcccccgcgtgggctaggtagaccccgaggggctggggacgaggcttcatgtcgtccgtaaccattggcgccttcataggcggaggaattttcatcaccgtccacgtcatcttcgtcatcctgatcgtcagagaagtccccttcctcgtccgctcgtagaggggcacctccatcatcttcgtcgccagaaacttcgccaaggagttcgcggtcgagatcatccagttctccctccataaagtcatcgggtccgtgctcagggtcccaggttggggtacccatagccgatggccctgcgcccaaagcatcgggatggccgtgagtgcccttggcctgtaacgctgcgggtttcttgatagtgccggggttgttcgttacacccgtagacttgcgcttggaagcactagggcgaggacgcgggcgggatcggttgttggaacttcgcacatcagcttcgagagccgccttggcctggtatcgctcctcgcgctccatcttgcggtctttcttgggaccattggcttcggtgtaatcccagcgatcgagtcggcgggctgcttttcgcactacagagagaaagacgctcgcacattctccaaagtcatcttcttcttccgggttcgggaagaggccacccttgccccacgaggtttcttcgtcatctgtatcgtagccctcgggcagaccctgaagcaagcgaccgtagcgcgcgaaaggaatctcactctcccgtttagcacggagaacgcggtatgcatttgatttacgtttagccagcagatagtcaatcctctgccgacgattttgctcaacggctatctggtgctgtgtaagtggccgcatccgacgcatagtaggtgccgatgaaagcgaaggctcagtaataaagcggttaagaactggatggttggggcctggaggagcgggggaagcatcgggagtatgttccatcctcgttttcaagatgagtcgctgttggcccacggctcgattaagtgatgattcccgcttggcctgtttaggtcgcggacgggagtgaccgggggtcatatcatcgtcctcatcatctaagctgcgtttagcagaagggtgtagaggggtggacatagcagagccacgacctcccataccagagtagtctcctgcgaatgattcttcgtcaatgccgaattctgcggttagaaaaggttagcgttctgtagacatgtacaatatgatagctctccagaattcccaactcacctttcttgggtcgcttgggaatgcgcggtagtggttcctcttcttccaggatgcctgcgcaaaatgtcagtgtcccattttcaacagtcagacctaggcacacgtacgtttgcgctctaatcttttggactccccgtattcctgttcctcgggtgtatctaaattctcttcgctggcttgttcctctgtcaagatatcaaaggcaggtactttcaaaggaaggccctctgcaccctcgccttccacacctggaccaaacggattgttcaaggcagcctcgcgactgaaatcgctctcgagataccaccacatcagccagaggaacgccctagcgcgactttggctgctaagtgtagacctcatgactaggtcgaagaagtctcgcggaggaaagaagtgtgtttctgacactttgggggcatactgcgccagaacaaaaatcaagttcacggggttggtccgaggtatattctgccgcttaatcttttcgagggtattcggctggtccacatcctctgaagcgcccttcagaatagacttcagacgaggagcatcctgcagctgcttgtaggcgttggaatcctgatgcgcttgtagtgaggggatcgagtggtaggttcggagttgagcacgcatttcggggaagactagaaatcgcgacgatagtgattagcacagaggtcaagtatattatggcatagctgcaagcgtacagttcagggtagtgttcatgcgaccgaaattgaccagcagacaaaccatagccatattgatagccgccggtttgtcgttctgcagtttatccttcagaatcttgctggtcttgctgctccgagccatcgcattgatgtaaacatccgcgaagtccattcccttctgtccgtcgggataccgcgtaaaaacaggcgttttgtcctcaaagaccagcttcaggaattggtactggatatctttgcgccatagaggtatgccgtcgtctttcttcaggtgtcgaatcttattgccagagtagacagagccaattgtgccattcgcttgccgccttgtaccgaccgttgcgctcgcggtcatgccgtgagactggtcatccgcagcctcggacatcgcgaaggactcgtccatcatactgttttcgaagtcggtcatcttgggtttattggaaccgctagcaggtccgcgatcaggattctaggagaatcgcaagttgtaatgtgaagtgccccctaggaggcggccgatgaaagaggcagaagtagtgtaagaggaacgaaacgaaaaaggaaaggataaaagtgaaaaggagtgccaagtaaaaccgggaaaagggaaaatgaagttcaaaagccggaaaaagaggaagaaagcagagccgagtggcccatgaaggtatagctggtgtgatatctacccgtatcagacctcgcgcgtttaatatggcgcttaatgccacgcatttggatttccaatcgacggaggaagcagcgcaatagcaactaccatttatgatgtgtgttatttacatgcatattagtcctacggaaatcccactttacaacctagagaagaattggaaacacttttcgaaattgcattggataagagaactttccttctcatggccatctcagggccgttggttcgcttgttcactcctaattcgaacccgagaattcataagtatgcccattcttccagtggcgacagcgccctatcccccgaggtccgagaaaaatgatcaaaatagacaaggaaatgaagcaagatgctctcattcggagataatcagcctccacggacccgaaagcagaggacatgcagttgcaggtcaagccaacgccatacagaatgcaaagaataccttttttggcttcgaaacacaccagccgcgccagggggtgtaacggcgagataaccagtatccgaaaaaaagcgcggagaaagaaagcgcacgtttttgttttcgaaaaaaaaaaactcgactgcagaacgcacgagggcagcaacagaaacaaatgtccgccatgagataccgacgctgtaaaaagtctatgctgcatatgatgaatgcagccataacaacaccgaagatgaatgcgaagagaaaaagaaaacttttcgagatgatgaaaagtcatcaatctccgctcggcgcacgcgcgtcactcgaacgtatccccagtggggatgctcgaacataaggggtatctgacgagagcggacataggaaaaaaaagacaacgcattctatgatgttcatgcagtttcgatcacgggttgccccaagagagtagtggtgtctcccaggagcaaaaaaagaagatcggactgcgcgaatgcctcgtatccattacaaggcaatatttgaaaagccatgaatagaatcagcgaagagacatgagaggaacagcaaaggaaacgagattaaagcatacgcaaacgggaaaatatgaatctaaaacaagcataggaaagtcgtgcagtcatgacaaagcccgtccctgagagatagcacaggtagaagagaactcagggactcaatctgatcgtatccgtcaacgagagacaaaagaaaataaagcaagggagccaatcagacccgagggcatcgtcaaaagaccacgactgatttaccaccaggaagatgggccggaggagccggaggggttgccgtagctaccaccacctccaccgtagccagcaccaccaccgctgccgccgtaggcgggagcagcagcaccgccatagccgctaccgtaggagggggcagcaccaccagagccaccatagccaccgccaccgccgaagccaccacccatgccgccagggatacgacgcacatcacgagtagcagtagcaccacggccacggccaccaccaccacggccacgaccgctgaatccgctaccttcgcgggcaatgctctccaggaaagcgggaacctcctggtgggcctccttgagaagctcgagcaagtcacggacaacaccacggttgccacggttgaagaaagcagtggcgataccggtgttaccggcacgaccagtacgaccgatgcggtgaacgtagtcatcaatgtcagtggggagatcgtagttgatgacgtgggtgacgtttggaatatcgagaccacgagcagcaacggcagtagcaaccagaatagggcagcgaccgttacggaagagctccagagcacgctcacgctcgcgctgggtgcggtcaccgtgaatggcggtcgcagggaagcgctggttaatcaggaaatcagagagcgagtcggccatgcgcttggtttcaacgaagatgagggtcaaaccagtgctgccgtgagtgtgaagaatatcgagcaggacggagcgcttgtcagcatcctcgacatactcgaccttttgagtgatgttctccgaagtacttccgacacgaccaacggacaagaaaatgtagtccttgaggaaatcgcgagcaagcatttggatatcgcgggggaaggtggccgagaacatgagtgtctggcgatcgtcgacaccgggcatatcctcaccctcgacgatacggcgaatctggggctcgaaacccatgtccagcatgcgatcagcctcgtcaagaacgagatacttgatgttagccagggagatacgtccacgctcaatcaaatcaaccagacgaccgggggtagcaacgagaagatcgcaaccacgctcgatctgacgaagctgagagccgatgtctgcaccaccgtacacgacgcaggggcgaacccatgagcggtaggcgaacttgcgggcctcctcgaagatctgagagaccagctcacgagtgggagcaaggatgagggaggtggggtaagccttacgctggcggccgtagctgaattgaccaccaccgccaccctgggtaggggcagcagaaggaccgttctggaaagcttgagagaggatagggaaaaggaatccaccagtctttccggaaccagtctgggcacaagccataagatcacgtccgttcatgacgatggggaccgagtacttctgaacgggagtaggaatgacatagctggcaagcttgatgttggcaatcaggtggtcgtccaggggagggttagtgaactgggtaacaggctctgggacatcgtttccggaggcctcaacggggatatcatcgtagttggagaaattgattccagtctgctgcttagtggggtcgtttggcactccgaacagctcgcgctccaggcgagcattggcaggaccgggaacgtgcttgccgtcgcgccactggccatcgcctgagccaccacgggattgctgagaaccaccaccaccgctgtagccgccgctgctgccaccaccgctagcaccaccataagaggatcctgggtttccgtaagcattgggattgaagggccggagttttccatcgggagtccagctggtcataccgttcgcggggccacgagggctgaagttgggagcgctagcattagcccagttggcaccggcgtcactataaaatacaaaaatcagttgccgattcatgatagtcagtcattttggtactgtaccgaggaccaccgaagccaggtccagaaggagcagcctcagcattagcactgggggcgggagcgggaccagaaccgggaccacgctggcgaaggtgaggaggaatgtaggcagcacggccaacaggggcgttaccctggggggcgtgctgagattcgttgagggaaaggtttcccatttgcaaaccgtcggccatttttgcggttgaaagtgtctattggaaagcaagagttagaagatgtccgatgtcgacggtgaacgatgttgcgtacaggtttttgcttcaccggaaaatattggtcgtagataaagcgcaagtgatctggaaaagatacttgcaaagaaaaacaaatccacgtaaagtgtacctttagagagagagtgtgtgaaaagatcaaatcgcttttctgttttaactcgataagaaaaaaaaaaaagatcgagtggcaacaagaaagctcaggaaaaccacagagaatatggaaaatgcaaatctccggaatctaagaactctagagagaagagaaagagagagagagagagtagtgagaaaagggatgatggaggggggttgaatcaagagagaaagagaacggatgaagtctgtgggaaggaggcaacaaaagttggagacttggggcgtgtgtggctgttggaggtacctgaatggaacctatctgtctgctatatttacctgcttactagaagtaccggttaggtacctaccgccactgaagaaatttctactcgccagttgctgcacgtaggcggtctggacacccttgcctgactaagataggaggcgaaccttacgatctgagtggatgattttcccgcagtcccccaaagtatatcaccacctacatacgtgaggtcacatccatgggtgatctatgatgagggtcatcgggcattaaaatccaggggtttagggggacagaaggtccaaaaataatgtctcattgatctaatatcatttcttaggcatcatactgtttctctttctcttgctcttgctgctggcctcgccgacgggcaatccagatacccacagcggctaccagaacgaagaaaatcacgaccagctgcagtaagtaagatggcgtggcctcgggagcatcgggagcattttcggtgacacttggctcttggtcgagttcttaaagttctccaacatcatcagccacttccaactagcagcagaaagtagacagtcacctgtctagagctcatcgcggctacctttttcctcggtctcgggctcaagctcgagctcgccgctcttcacaatcttgaccgctagcttgggcctgtcgccggatcccttgggaacgttttggatcttgtcgacaacctcatagccctcaaggacctcgccgaagacgacatggcggccatcgagccaactgcgttgtttccgttagttattgccccaaaggaatcactgcaagggatacgaacgaggtgatagcggtggtgatgaagaattgagagccgttagtgtccttgccggcgttggccatgcctaagaatggtcagatgtctgtaagattgaatcaaatgagtggaaatgcctactcagctggcccttcttggtgtgacgcagcttgaagttctcatccttgaacttgttgccgtagatcgactttccgccggtgcctgtacacacttagaataatgcaatcaacttgctcggaggctcacaaaccatcgcccttggtgaagtcaccaccctggatcatgaagtctttgataacacggtggaaggtagagtcctggtagccaaagcccttctcgccagtagccaaagcgctagacatgggttagcatatgcaggataaacgttgcagacattgacatagcaatgcaccataccggaagttctcagcggtctatacaaataataatgtcagcaataattatcaattagttactgagagtatagttctacagacctcagggacggtcttgccgtacaagcccatcacaatgcgaccgaggggttcgtctccatgctgaatgtcaaagtagacctgtcaccaacaatcagtaccgcttgcatatagaccgagtcggaatatcaatgtcaatcaccttgctggtaatcttagggccgcgaggctccttggcctcttgggcttgaaccagggcaaagccaacggcgaagacaaagaacagggaaacgagaagattccggaaatacatgattgttaattgccactgctctggtaggatacagcgagacgggaagatagagtaattgggagcggaagaaggccagcttgcaatgcggagaatagacggggtagtgccatggaattcaggcaccaagttacggaaaaacgttgacggaggatttctcccggagttcaacgagagcaacaagtgacggctccatacgattgtcaggacatcaaccagccagcacagttcaagatggtatgttagccaccgtcaagatacaatagttcctccaaagaaacctgctaatagcctttaggtcttcatccttggtgtcaatttccccgagcggaatctgctcaaggcaagccaacccgcacgattgcgcccatagcctggatatcccaactaacatacattgagcgcaatagaaatccctcgagaccttcttcggaatcggcagcaacggctccggtcgcctcatgtcccgcttcaacatccatccgacctgccgcgtcggcgagctggccaacaagcaggtcctcgacctcacagccgtgctatccgaaatgaaaattgagaatgatctgcgcagagaagttctcaatgatatcaagcgcatgaaagagaccggaacttaccgcggccgacgtcatgcgctgggcttgcctgtgaggggacagcggacacgaactcaggtgggtttccccttcctcctcgtgctctattgatatctcatattgcacctgagagacctatgcgagcttatggttaactaaatcttaatagatcaaaactcctgtcaagttgaaccgcatggagcggagactataaacttgatagtgtcgtgttcgattgttacttttatgggatcgtctcactgtttttcgtgagaggcatggatttggcgttgtattgatttctggcactcgacctttgccagtttatatgtgaacggaacccctctgtggatgtattataggctaggcataaacctggggtgaatggaagcttcaaaacagaactatatatatgtacggtaaagtcgtagtgaatatcaggctgtagtctgacatatatccaattccgagctaaagatgtacgcaaagatgggaaagtaaggagaaaaaaaacatgtaagtctaaacttttgccctcaaccaagtgttaaaacgccaggcccatatgtgcactcatgccttcgaaggcagtacgccttcgccgcggttgatttggatccgcttatcctctcccgcgctgacaatgcccaccgtcttgtcccagcacacgctgaacaccttgacaccttcaccgccaacccgcttgctatcggacttaccttcctcctcgaggctcttgcgagtaattgagtaaacgctctcaccaacaacaccttccttgtcggtcttggtagaccggatatcccaaattctgcacgtgccgtcgtggctaccgctaatgagtccatatgtgctgtgagggtcacgggccaagctgacaacagcgttggtgtgacctcggagggtcatggcagccacagtagtagcagaggcacgtgggtcaatcagagtgatatggcgggcggcagtaccggcagccaagaggctgagttcggggaggtgctcgagcgagaggagcgagtgtgatgtggtgcgagtgtcaaccagagaaccagtgaccaaatcccatgtccgcagggagtgatcccatgaggccgagtaaccaacggtagcatctcttccatcgaaaatagcagcagaaacaggtgccgtgtgggctgacagaagagtcagaggaccacgctgcggtgtgctaacggaggtgttcagcttgcggcgctttgtgttccgagcattgctagaaggaagcaagttctcaggtgctgccggggcatcagtcttcttagttgaccagaatccaacggtgctatctgcggaaccagtcaatagacggttggacttggcatgaactgctagtgactcgattccagccttgtgaccatacagctccagctgaggagaaatttttccagtgaaaccaccttcaccctcagtatacttccacaatcggaccgtgcgatcaagacctgcggatgcgatctggtttggagaaacgaacttggcggttctgatagaggcggtgtggccaccatcggcggcggcaggagaggtcgcgatagtctcagacgacatattccagatgcgaagcagaccatcatagcttcctgatagaattctttcttggcccttgataaaagtcgcacctgaggcccaggatgcagcatgtgaggtcgtggaaaggacgtctgtcgcgctaacccagtcatcatgctggaacgaggcgatatgcaggggcgggatcagagctcgaacatattcaatctcgagggtcgtctcagctgagataccgttgtcgaccaaatattcatcgatcgaggtccgcaaaaaagttccattgatcaaaaactcaaatggaatgggcttttcgcttgagagaaggttgttcacaagtgtcgatagcgcatatcgtcgaagccctttttaaaggaagagtcagtatttgatactactatttatgatttctgatcggcaatgggtctcacctgtaggaacaagaattggaccggtgctttcaggcagagcaatatcctcctgctggctaatgagctgcacacggacttgtctctgtgctgactctgcagcagcagaagtgactagatcttcgctcattgtgaaatcgttcaaattgctgccggtgttgcacttttttggtggctgtcgcattttcggcgggtgaggaaaaaatacggcgacccgtgcggcacacttgcgcagagcgcggagatggccccactcggtctacacagcttattgtaatacactgcagttttaacatatatctggtgaatgaagtgatatttctattacgtggatggggcttatcctctaggcgctcttcgaatctctgcaatagcacgtcgccggtgatcagactctgcgaacaaggcctcgatcaggtcaatcacttcgtcagcagagaactctaagcccaactctccttcgagccaaaggaatttgatatcggcgagggagctctctagaatattgatcatatattggaaacgcagccagcttgaaacgtagatggcagtgacgggtattgcctcggcatcaccatctgtctcacgcatgaacaggtcctccaattttgagagttggttacagaaggagaccagttgccgtgactgatcctccgagatatcacccaaatcttcgatatcgatgactaccttgttgatcacagtagataagagcgatccaactgattggagcagcgcggaatgagacagtatgggttgccattccttgtaaacgtcgcgaattcggtcgacggttgcgctaacagaattctcacagtctgcctggaatggctgctcggagcattgtccaaatccctgggctccgtcaagcagatctgtgacgatagtgcgttgcgtctgcatctctttgctatacgcaagtttgccgaatttctccaaagcttcaacgtcgggctggagtttggagagtgcatgttcttcgactagtttccggatctcatcggcaaggtacagactatcattataaaggtacatctgccctgaagtgagtttcagcgagtagaatgtggatgatgtagctttgaacatagccaggatcaaggttggcaatgcaagaagaccagcaccagaagaagcgacgcgggaattggcgtagctgggctctagttagtttgcaaaggaaacaagttggaagacggcatgacttacgcaggctgcgaaatatccttcgaatcggtgatttgctgctgaacgaccttaagaacagactctgggacatcggtgattgtgaagacttccttcagggtaacttcctttggtgatacaaattgagttgtattcttcgtgtcggttgcgtttgtcgatgatgttttctggggctccgaaggcttattatcaactttatggtcatcttcatcctcatccccccagccccaggcatcatcgtcatcatcttccgcagaagcagctgcttctggtttggcatcgggagtctcctcgacgtcctcgtcatctagaccccacgcactaacatcttcctcttcttcatcaggctttgctgtttctgctttcttgggctcatcttctttatcgtcatcccagtgggcgtcccagtcctcattgccggcattctccaataaagcaccttcagcttgtgaaacctttcctctttcaattcgttcgacctgtttcgttgttccctgactggcggcaaggactttgcggacgctatcgagcgagtcgactctacgccgagtcaaccacaggcgtggagcttggttgacccacgagacgagttcttcttggccagtccaaccccacgactctatctgctgggtgaactgtgaaacatgactcaggatattctcaaactcggcgaggccacctagatcggtgggaatagcaggggacagccactcgcagattgcctttgaggaaataatcgcaatgaatgattcggagaaagtcgcggacaccgatgatggtagattttgtcgcaagtagcccaaaacgctggaaaggcgatccaaggtctccagtgcggtcgcctttgaggcctcaggctcaatgcgaatgctagtctccgtcaccaccacaccatggctagttccattagggtgaggtagcaagatcggatttacgatcgccgaaaagaggtccctttgcagtttctcgatggaggatgtgagtatatctagtcgggccagcgacgtaatagtgctctcaatagaaccggcatctgcatctccgctagagacatggaattcgccttgttgtcggtcaactttcaattgatcagcccagcgcgaaagaagggcctcaacaatctccgatcgtaacagtgacacctcatcggagagtatacccatcacatttgtattcgtaaagaaggcatcctttccaacagctgcgtcggtagactccaattgttcaatggcggtggtgatctggccacttctgagagcagctcgccctgtttccagctgctggcacaagcggtgcacctcctctagggtatccgctacggcctgattgaaggcaatctccgtctcaaccaaggtgactttcgctctcgcatcttcaaccttcgcctgcaggggttcggtatgctcatgctgcgcgattatttctcgcgcagttaatcttgagcgttctatgtcggcgtgaagttgtttcgcttggataatccagtcgtcggcatcgaaggtgttctcgcgactcaaggagctaatctcattctaatcaaagcagcgctggtcagtaatgaatgcccgacgtgcgtagatagccattgggggcttcgtacctctacctgctcacgtgccttcgatataagctcgagctccctggcgagagcagctgccgggaagttaccagcaactacactctcctcgggataggtcccttcggtgacaaagcccagcaccgcctggcacaactcctcggtatttcctgccatgataccaacttttccaaaaccaaggacagattgtcagggaacacgagcttcggagcttcggagacagatgtgcatgtaaagaggagttgagctgtcaacaacccgtgacttcgaatttgggcgtcaccgccccccacgtggtgtatacgctgtatgctttcgctctagatcgctaaattcgctagaattttaattaaaaatatatctcgtttgtatttgaatggtcgcaaagaatccaaaatctattagccctctctctttgttatataaattctttcagttgcccgctttgtaaggaaaaccggagactgagctctctcccaaacttggaaaactccgggaccaacacaacttttgaagacatctcagattcaccgtgtctcggatactccccctgagtcgaagtacttgttttctgtaagtcaatgtgaattgcgttctcagatcttattgcctacggaggggcatcaagtgtatcaaccttctatccccaatttctgcttgtcaccccgcctatgtcattgtccttgacaatatgttgcacctttcaagatatgatttagaaaggacctcgccaattgctgcttttgttcccattctattcaaacgcgactcggggtggatattcttctctcatccgagttgtggtggtcatacttgttctcggacaattccttaccgcacgtgcttatgtgctcacgactgtatcaaatgtttaataaagtgacacgaattgctaactaatcaacaagactgtcaaccctacggcgaaatatcttcactgggtctgtcccattgatcaatatgtcgccctcggtgcagaacagtcacttcaaactgctccagcagttcaagcctgattactcggcgagcgagttcactcagtatgaatcacagcgtaccggcatgagagtggtcgttatcgaccagccgggtcccaaagtgaacggttactttgtgctcgctaccgaaatccacgatgattcgggtgctcctcatactctggagcacttgtgcttcatgggttcccgcaattaccgctacaagggcttcctggacaagctggctacccgcgtgtactccagcactaatgcctggacggcaaccgatcacactgcctacactctggataccgcaggctgggaaggctttgctcgtatcctgccagtgtacctggagcatgtcattgctcctaccctgactgacgaaggctgctacactgaagttcaccacatcgatggctctggaaatgatgccggtgtcgtgtattccgagatgcagggtgtacagaacaatgcggctgagctgatcgatcttgcagcccggcgattgacctacccgcctggtgtgggcttccgctatgagacaggaggtatgatggaacagcttcgtgtcttgcctgcggaacggattcgcgagttccaccgtgagatgtatcagcccaagaacctgtgcctgatcctcactggagaagtcgaccagagcaacatgctggagatcttggataagttcgaagacactatcttggatgtcattcctagcccagaggcaccattcaaaagaccctgggtggattccaaacaggctccctacttggagaagtccgctatccagaaagttgaattcccagaggaggatgaatcatttggtgaaatcgaaattcgattcatgggaccggactgcactgatactatcttatgtaagatacaaaaccccaagattcgatatcaaatacttacagtatcatagccggcgctcttaatgtgtcacttttgtacctagccggttcatctgcagctctgctagagaacatccttgttgagaaagaacagctcgccagtgccgtctactattcaactgaggaccaccctagcatggaggttcgtttcacgttgaccagcgtggaaacagagaagttggagagcgtcgagaagagattctttgagatcctccaagatgcgatgaccaaggaattagatctgaagtacttgaaagagtgtatcgcccgacagcgccgaacctggaagttctcgactgagtcttctgcctcttcattcgcagagtacgttatctctgatttcctgtacggaaagcgcgatggctcaaccttgatggatgtcgcaactctgaaggaatatgatgtccttgaaacctggtccgaggaccagtggcgcgctttcatcaagaaatggatctcagatgctccccatgtcactatcttgggtatcccgtcccagaagatgtccgccacgcttaaaaaagacgaggaggaccgggccgctgcgcaaaaggagcgtctcggcgagaagggcctgaaggagcttgccgataaactcgataaagccaaggcagagaacgacaaggagattccgcaggagttgctggaaaagttcgccatccccggaactgagtcaatccacttcatggagaccagtacggctcgttcgggtgctgccctgaaatctggacggcccgacaacaagatacagccatttgttgatgccgacaagtctgaccagtcacttttcatccacttcgagcacatccctagtagctttgtccagctttcagttctcatctcagctgattctgtgcccgttcagttgcgtccattgctgtccatctataccgaggcgttcttcaacattccggtggagcgtgatggcaagatcattgactttgagcaagtcgtagtagaattagagagagacaccgtcggatactcgatgacgactgctcgcggtcttgggaactcggagatgctccgtatctccttccaggtcgagctggagaagtatgcgaatgccgtcgcctggctgcaggagctgtgctggaagtccgtcttcgatgtggagagactccgggctatcaactctcgtctcttggccgatgtgccagactccaagcgcagtggtgactccatgcttgctgctgtaaatgtgatggttcactacgcagaggagtcgatcacccgggctcgttctactttggtgaaggctcgctaccttaagcgcgtcaagcgtctgctctttgagaagccggaggaagtcgtcagccgcatggaggagatccggaaatcgctcttccaacccgacaacgtgcgcatcattgtcattgctgacctcgagaaactccagaacccggtctcgacctggaagcccttcgccgatgccctgggcaccagcgctgagttgcggcctatcactgaccggcgatcccagctgagcgatgccggcaagaacattggcggcaagtcttacattgtccccatgccgactattgactcgtccttcgcctacgccaccgcccgtggtctgacctcgtacgattcccccgacctgcccgcactattagtcgcgatttcgtacatgaacgctgtcgagggtccgctctgggttgcagttcgtggcactggtctggcgtacggcactaatttcagttacaacatcgacaccggctttgtcaacttcgatgtgtaccggtccccgannnnnnnnnnnnnnnnnnnnnnnnnnnnnnnnnnnnnnnnnnnnnnnnnnnnnnnnnnnnnnnnnnnnnnnnnnnnnnnnnnnnnnnnnnnnnnnnnnnnnnnnnnnnnnnnnnnnnnnnnnnnnnnnnnnnnnnnnnnnnnnnnnncttcgttgtgtcccggcccccgaacgcccacaaggcgttcgagtctagcaagaagattgttgatgactatctatccggtgctacgactttcgatcctttgatgctggagggtgctattagcagcatcgtggtcaactatgccaacgagcagatgaccgccgccaatgctgcccagggcagtttcatccgccaggtcgtgcgcaacttgcccagcgactataaggagaagatgctcaagaatgtgcgcgctatcaccatcgaccagatcaagggtgctctacgtgagatcatcttgccattgtttgatccgaagactgcaaacttggttgtcacctgcgcgactgtgttggaagaggtgagttgttcccggtctttacgatgtacgtatggattactaactttgattgcgaacagaccatcaatcagggcttcgaaagttccggctttactcccacagttcaggctcttaaggagtttgaggacgactatggtctgaaggttggtgacgaggaggaagatgaggatgatgacgaggatgaggactccgaaagcggatccgaggatagcgacgacgaaagcgaagacgagtgatatgttttatgaacgatatctacataggtagcgaggtagatcacataaagggaattgtggtgtcaaaagactctacatcacctcgacagtgatgaatctactctcttactcactgaaaacaggctgagactcagtaaacaccgagatctcaacttaaacaaacaaagctgaaataatcgcactatatgaaatgtagtcacacacttcctcagaagaggtaaatatggtacacgccaggcaagacccgccagcaaccgtcttgcctgaacccgaatccaatcttgaagactgcaatagttccaagaatagataaatcggtgaactgacctcttactttactcccatcgccgtgagaaggtacggatttcagtcaacccagcccaccccggcctctatgcccgtcatcgtccacagccccgaacgatttagaggtcagacccgaaacgaataaaactaccaactcaactccttccggcccttaagagtcctccgaataagagtcttacgtccattcctgtccttcttgcgcgccaggtatccatggcggcgcttttggacccgtcgcgacgggctgaacgtcacacggcgcacacctagggaggcacttgcggagaaagagcggcgctgcgagggtgtcttctgggagaggagtgatgacaggggtgagaaagcagttgcggttgcggttgtggttggcgaggagaggcggccgccgattgttcgcgagggttggaagcgggttggcgtggagaggagggaggagaaggagcgggatgagagcattgtggagggtgtgcttaattgttgcgggatttgggcgaatctgttgtcgggggagtagaggtattagctgtctggttggtttcgtggtggaaaggttgttggctgctgtacctagtcatcggggtccgcatggccgatgtggtggcctggaaggctgagggcacggccctggtgcggaggcagaacattttcaggtccctggctttgtttggagggcgattttgaggtggggtgggaacttcctgaagttggagatcgagtgaggcctgtggacaagacgcggcgtcggaagacagaaaattaagcgcggagccgcttacacggacccgcctagatatgcatggctacaatgatgtacggttgtacttaggttatacaaaggatagaattgggtaggtttagagtgtaatatctacaaccctataactataactacgcttgtttagctgtgaacaaatataacagtatacttgcagccgttaagaagacctacccgatcgggactagcgtcaccgaacttttttgatctcgagattcgaaatgctggacatcgctcgtgcaactctccgtcctactcgcaaatcacactgaactcaaggagaactctactctcagctctgtcactcccattaccgggttaaaccactctataaccaccgccaccaccactctttaacctcaaaaaacccatcaaacctacgaagaataaccaattccaccaaaatggcaacccaaggtcctcaggccctgcctccagtcacagtgcgaaacacacatgtcatcagccagtccgcagcgcatgaattcctagccgcctatctggaccgcgctgcgacagacccatcgttgcaacccaacgccagcatcagcgagcatggtcctgtctcacggacaaccaccgcagcgccgaacttgatcctgcacaacttgaagcgcgttcaaatgggcctagctggcgagttccttggtcgtgatctgactgtcgcgaagcagaaccccggggaggactatttggatgttgctgcgggtattccgcagaccaacggccatgatctgccggacgaaagcaatgatcttgtcatgaatgatgctgagtttggcatggaagctgaggctttcgcggatcaggaggccgggattgataaggaggaacgcaagcggaagaagaaggagagacggttggcggagaagaagggtaaggccaaggcgaaggctgaggaatccgattgagtgtggtgtgggtatatatatctgcttgtgggcgttgctgcattgggtcggagtcttttttcttttattcgttctattgctctattactctgggctggttgggttttggacgtacaaaagcactgctcgcatttcatgtctggaacaaaaagtgtcatttaagagtttagacggattgctacaatccaatcaatacataatagaacatttccaagcctcgcttttacttctcgagagttgagttccaccatgtcgacacaaaaaagtcgtgtccatgtcatataaaaatcgccagtataacacgcaccacgtttacagctcgcgatctgcggccttgacaggcttttcactgtcctcctccttgttgctagtgaccttgccacccttccagccaagcgcagcgagacgctcggtgaggatggggtgggagtagtggtagctagcataaatcggatcggcatccatagtgctcaagttctggatctggagcttcagtagcgaggaagcgagcttgtcagagtaaccgaggttctgggcgaatttatctgtggaacattgttagtaaaaccgagtgtaaaaccgagtgtaaatgtgatggatcgaatggaacataccggcctcaaattcgaattttcggctgagaatgttcatgagaagcttcacgacagcatccataggagccagggcgtcggagaagagcaggaaaccaatcatgataggctgttcgttgatgaatccgaaggactggtacaacgacttgttgttgacaaagacggagaagagagcgaaaatgtagaacatgtgggcctggattacatagttagtgataattcgccaaaagagcaactgaacaaattcgtacctgggcaatgccgaagagcttggtggtgtggctgaggctccagtggccaagctcatggccaagcacagcaacaacctcctccggctcggtcttctcaatcaaagtatcgtagatgacaatgtgcttcttccatggcagaccatagaagtaggcattgctgtgggcactgcgcttgctgccgtcaatgacatggagctcggagagagggaagttgagtctcttagccaagttctcgacaccggtcttgagttcgcctggctgaagaggcgagagcttgttgaacagaggcagaatcgcaatggggtagatagtaatggcgaagatctggaggaagacaccgaagagccagaggtagtagtagaaggaggtgtcaaacttctgaacaatcttaagaacggcagtgataataggagttcccagaacaattccgagcatctgccccttgagcatatccgtaatccagagcttgaccgtctgcttgttgaaaccgaacttctcctcaagcacaaacgtgttgtagtacgagatgggcagcgagaggatagtgcttataatgttgaaaccgaagaagaataccaatgtctgacaaatttcgccttggaaccgaccggggagataccgagccagcaccagaccgctgaggccccagatcttggggagaacatcgccgtagatgaaagcaaggttttggacttgaccgtaaagaccagagatgaagccgaacttggcctttgcgcgaccgtatgcctgtagtgatgtttcagtaagcctctgtatatgatataattccccgtcatcgggttcatacctgactctggtcaaagaccttctgggtaacctccccttcgaggacctggggaggctttgtccgttgcaaaaacttgtactgccgaagtgacaggaaaccctcaaggacgaactggcccactgaaaatcccacaagcacgttcttccatgggaagagcgggcgatcgagcaaacgcgccaattgctggaggacagttattagcgacgtgtccacggtggaaagcatatttaccgtataaacatgatagtatcaatcaaatcaacttacctcgaggatatacatgatcgaaatcgcgcaactaggcgaagaaagaggacgttgttcaaggcagaagaagctagtttgttattatcggcagccttagtcagatctcatgcatgacccttccatggcccggggcctaacgcaacgtcgatctcaggaattgggcctattaattaagtaaagtcttgtttattttaggccaaatgtgtgagatgaggagttagtgggagttaattatatgctagtctgcctgcatttgaaaagtaaataactggcgctgatgcattgctgaaagtcttagtacaatactcgaagattgtagatgtcatctatactcaaaagggtagtatttctcgagtcgctctatatataaaagcagttggtggcttagcgcgtttgatcatccccgtgcgaggcaatacgagtggttatggtcgtgcaatatatacatccgacctgcagactatctagcatctaccacattgcaaatgtttatatcgattaaacatacagaagctctttgattatgccggccctaatttccctgcatttcagatcacagacctgtataggcctatctacataagatccgataatgcagacaaaaaatgagcaatgaacaggaaacctcttgggaacaactccctcgtacgatggaaataaaaagcacatatcttattcgccgactccacctgcatcccgttcgtcgtccgtccctcagatcaaacccgagcatccagtcgcggaccaaatcaagtggtcgctgacatgcatgaaggtaaaccgatcaaggtggcgacaatacatgcattgcgcatctcctccatcttctctattcagccgggggaatcagttaaatcacgtctttaattttccgactcgtcatgaccataaacttttttgcaatcatagatcgcaagactcgtgttcgagggttggtggggtgggatcgttatgcggagatatagcaagatttatgtgcaaatcaaattccccaacacaacagatctcattccccaaactccccattccgaactgggaaatcgttcaaaggactgctttactgctgcacaggctcaagggtgttaccactgcgaattgaaaaagtcagcatttgtcactagaaataaccccaaaccagtagacttacgcaacaatgttggcccatccgatcaaacgccagtgcttctcaattctgcgactgatggcgatcttctcgccaacttccgtgcaggcgggactggtcaagctgagcttagcggcatcagccttgacaccgaggaccttagcaccagtagcggtagaaccgatgttaaccatcaggacttcgttcttggcaagcttggcaaccttggcctgcttgccgtcggcggtcttgacacccagcaagcggcggagcaggaagtagttgacctcaatctcagtgtagatagcaggaaggcggccacggtgaccgagaacgaaaccgacaagacgatctgcacggcaaagcgtggggtcgacacgggtaccaacaccaatcaaaccaccaggaacggcaaacttgaggtcattgtgctcagcgaagagagacacaatgcgggagaaaatgggtcgacactggatcttgccctgctcatccttggtgacgagaccggggcggatctcaatctcatcgttcagctttacaacaccggtaaggatggaaccaccggcaacaccacccttgagctcatcaatctcggcaccgggcttgttgacatcgaaggaacgaatgatcatcatgtgaggcgtatcctggaagttgcggatggggataggaatcgtctggacaagtgcctcgttgacagcatcaatgttgtacttcagctgcgcggaaatggggataacgggcgagccatcagcaacggtaccacggatgaacttgagaatcgactggtagtgctcaagagcgttatcgcttcgcatgaggtcaactgtttattttcatacgtcagtgcttcgtttcatcgaccgtttacaacaaccaagattttacccttattttggagaatgatgatgtggttgagcttcataatctcaatggcagccaagtgctccgaggtctgcggttgcgggcaagtttcgtttccggcaatcaagaggagggcggcatcctaataaaatgatgttagcctatcaccgatcccttgaggtccgaattggtgcagtgagggatgaaacctaccatgaccgcggctcctgaaagcatagtgctcatctgtgcaaagctgattagcatcaacccttaagagaagctagattccctaaggtgcgcaagatgcgcaagggagtagatactaaccagaatatcgtgacctatgattgaagattagcggggttttaatttggacatagacatatttagcgaacataccagggcaatcaacgaaactattttttttggatcaaaggttagcgtataccagataaaaggagggaccttcgggttggaggtagactagggattcgcgatacctgacatgacgctatatcataaaattagatgagggccacttgaggaaaggctctgagtttagacttcagaggggaggcagaagtacataccagcaactgataacgacctgtacatccctcgcgctcacatggcgggtcgacttccttctcgctcttgaaactcttgtaacatgtagggcgagggcactcggggctgtcacacttgtagatcttcgcgttggcgtaaccaagcttaatggtaatattgcgctcaagctcgttcttgaagcggacggtttgaacctcagaaatagccttgacgacggtggatttgccgctgaaattatattagtatgtgtgtaggaagaaaaaggcgagagaaggtgtctaactgtgcgacatgtccgatcgtgcctggtaatcatgtcagtaaatttgttatctagtaaaataggtgcgtttctgaacgcgctttcaaagacgcattcacaaaccaacaatcacataccgatgttctgagtagcttgccgagcaatgatctcaggcgaaagaggtgtcaattttgacaagtcgagggtttccgggttaggctgctcgggcagttctgggcgcttcgggtggggagcagagtcagccttcttcatggcagacttgagaggcttctcctcctgctcgaggggctcctggtcctcaacctctccgcgagcgttgtgggcatcgagcaaaggtgagccgggctgggatccctcgtcagagaaatcgccgttggaagccatatttgcggaatgaaatagaaaatcaactcgcgatcagcagcaaagttgaatgaaaacgcaggtggtcggacgaagctggtggaacggtagaaggtggaaggtcggatgaaaattgcttcccgccgatatgataatggaagaatgtaggtgggggattgtgtgtagtggagagccgggcggtgtctagatggcaactctacattacctctacgttataacggttttagtaaatatgtatagagaatatagttcaattagacgtttgttcaagtcgtttaatatagtttaaagtgtcatggtttattgtgcgtgattcgttatcttctaagaaaaaatccctaactaatatacaactcacaccaggtacgccacatcggttttatagagcagtgagggatagttaacatactaaatcattcttattcgacttgaatttaaagaaagaactatttcaaaccataatcataattattttcttgggcaatagactcagcttcttttcatacatactcatgatacattggttgccactgaggatctatttgacggcacaaagggtataaaagtcggggagcaatgagaagttactcatcgtcactatcactcgatgactccacttcttcttcagagtcgtcttcggagtctatcagtgtagacggatcctccgcaggcaacatgacaaaggcagccaagcatgtgatgcggttaccagtctcattggtagtcaagagctttccaatctgagtcgtatccctctttccttgctttgctgcggaaacttctttcccagtaaccttccaaacacggacgactccgtcactgttgccggtaacgaccaagaagtcgttgcggaattcctttgcttgaccttcaagagtgaggatttcgaaatccttgatgcggccagggaacccagcttccttcccaccaacctgagcaacaggggtagcatgggaaattgagcattcggtatcatcctccgcttttttcagttctttggttgaatagaagatcactcggccatcctctgtagagacagccaagaaatcttccttttcaccacccttcaaaggcaaagaaacatacttcatctggtgaagtttgcttcgtgggctaggaagaagtctgcatctcggaatcgagtcctatgccaatagtcagaaatttgatcaacggtataccatccaaataacttacaattccgaacacgactgcaccccattcgaaagcaacggcaaactcctctccttcggagtcccatgcaatgcgccggccttctccagtgctccatctcgactccttgacaccctgtaggacttcccgggtaaagttcaacacaccagccttcctgccggtcaccagattccacaatctcatacatttctctcctcgcccaacacttagcattagcttcatactggggtgaaccgcaaagtggttcactccagatggagcagctccgggaggcgctgtgtcaccgcttggccgtccttgaatttttgggtttggtgctttgatagttgatacaacggtccagtcacgggtcttggagacggaaattgtgttatcctctccggctgcgagtaacttggttcgcgaagggaaattcaacgaggtaatactggcagtgtggtgcaacaatgatcctagctcacggttccggggattttcgaggatcttgtttccggcgaaggtcggcacggatggatagtcttcattcacggcaggtggtgcggcggagatcgaatacaagttgatgcgctcatctgtactaccactggccagcatcaccttttgggcatcgacagggtcggtgggcttaggtagtggcgacaatgctagacaacgaatggcagatccatgggcttcgaataagaaagtatccatgcattggatggctggagagtcagcctcagcctttgctttcaggctggaggctgggatcccgaccgtgaagccatggagcactcgctcataagagcccgtgacaacctggacagtgacagctgcatcgggagtctctgacggagtagggatggatttagtaaccttgggaggagtaccagccgtcttgtcgtccttggaggcgtcggttctcttgcgtttcaccatgattgctcaattaatgattgtggtttctgttatattgtagatgtgaaagcttggtctagagggcggacaactttttttcttttttctgccagatgtttatcggccgccttgataggaaatagattcatggcctgaatgcctcaccgccattaatatgaggtgtccaatatatatatgcctgaggcgtcacacacgcaagcggagtcagaacaatacggtgcgttaccagttgacgaagacagccttttttgaaacgcagaagtctctcacaaccatattctagtttaataagatagaaactattcttgcattctctaatagataataaacattattttttcattcatcatcaaagagaattcttttgaagtaccaggtacctggtcaagccgtgtattttttatagagggagtgagtaactggttgtacctaaaccaacatcttcccgttcttccacatttttcataccgccctgtaacctcattttcacccccttcgaaaagatcctgctctaggtgcttttcatcgcctcctaccctccacccatcagtttcatctttttcgagcgattttttccatctggatgacctcgctcgaccagttccccttgttcccgcgttaatcggatgctgcgttccgaagctagactccatgctccgtgacgagctcctacgatctaaaaacgatgagatcgcgtacgtattaatttttatcgcgacggaaattcgattgcgatgcctaaaaaacgatgaattcgtcgctaatttggtggttagaaactgtttgtcgcgcagaaagcgcaagctcagcgcattgtatctagccacggtcgggtttggcgcgaccgaggacgctcattaccaccagaaagaacaggccttccttgacgccaatgatctctccaagtaagtccagtcgctttgatactctactagtggggttcaatttgcatttatttattttggtttgtaatttctcaatgctgattccctatccagaggtcgttatttcgatgaagctactcttccaacgccagcccatgcgcgcgcgccctcaccaagtcgaaatgcgattcccccgacaacacctgccagcactagtgccgaacctgtcgccggggctactccacccttaacggtcgatggcgtagttccgaatgcgactgagcctcaacagcgcggaacgcccgttctagaccaacctcggaccgcgacacctaatctccctcctacccccgtggatacaaccggaacaaatcagctctcggtgccagcaatcagccctaagctgccaaaggacctcaacgtgccaccgatccatgtgcagtcactcgacgcatcgcgcctcgaccagaaatgtagtgtaccggtaacagaaacgccgcttagtgcctacgagcatgacgagaatcgagcaaagatatctccccgcgtgtcaaagctagctgctactggagttccatcactggagattccctccaaccctcttcgaaagaaaaacgaagcacgaccctctcttaccttgggaccatctcacgaccaaccaccatcacccgcctcctccactgacccctacaataataatacacctgttcccgttgccgtatcacccgacacaagccccgcagaagaagttactgaggataatgggacaattgatcgcccggaacacaagcatgaccgatttgctcatgctcgcccgagcttggttcctttgaccccagatgagcaattgcgcctcgaagaagctcagtcgaaatctgataagcccttgaatgatgtggtcgccgacataccttcatcgaaagaggtgattgtggagagcgtggacaccggtgccgatacagatcgcatggatatcgaccaggaacctgctcccgtctcgtctgaagcgaaaccatcacaagaacctgggacgactttgcaatactcgctgtcaccaaccgcacaggccgaggccactgcagattccgctgtcgagactcccgtggctaaaaagccttctatcccacctacgcaacctagctcagcgcaaccagagcgcatgacgactcgtgtatcatcgggagctatacgacacaagtctgtttcagagatcctcggagaaactcctaagagtacccctcatgatagaagccacgcagccaccccatctgatcaaggctcccctgattctgtcgcgagaatgcgcttcaaggaccggaaggagcgtgagaaggagagaagccgactatccactgttgtttttcccaagcagccaactcagcaggagaaagccgactctatggagctgacgcaccgagatatggatgcagttgccaagctgaatgaggagcaagactatcttttcacgttatttttgaacagagcatacgctcctccccgaggaacaaacctcaatactctgctggcgtctgcgcataagactttgagcactagcaatcatctgcttgaataccaagaacagatggattgccgtactctccggcgcatctatgctcttcagaatgccaatcgatggccattgcgacaattaaaacgctccgttgaacctcctcgccagggaacacattgggacgttgttttagatcatatgaagtggatgcgaaccgacttccgggaggagagaaagtggaagattgctgctgcaaagagttgtgccgattggtgcgcagaatatgtcaacagcgacgtggaacatcgcaccttacttcgtgttcaagcaaagattccagcgtcaactctggcggaaaaaaatccctctaaggctggtctcagcccatcttccgacgttggtgatgaaatgtttggtgtttctcaccccactccagatctcatcccatccgccgaagaggaatcagtcagtgatggattcaatgatgagcctcggcatgatattcacgacaccgtcgctcctgctgctattttctccttgggctcggatgagttcaacttctcaattgacatgacccccgccgctgaaaagctgttggaggaactgccaatatatggaccactccaaatcccccaaggcacgaacacaccggtattcaaagtctcccctgacgcagtttggaaaacggaactgctaccagtgtcgaaatttgcatcggcgaagattagcttccacgatgacgagcgtcctcgcaaacggagtcgatatgattactcccagtatggcaatgatgcggacaatcgcatcaccgaattggcacctgagcagacaaatgtcgcgctgttccgaccagagaacaagcccattcgtgatcggattcaccctggtcatcaattccggcctccgactgaacaccccatgccttctgttggtttctttgaatcacgttcgtcctcacaatggacttacggtgaggatgatgaactccgacgcttggtcaaggagtactcttacaactggtctctaatttccagctgtcttaccccatcgtcgctcttcacctctggcgccgagagacggactccttgggaatgtttcgaacgatgggtaggactggaaggtcttcctgcagatatgtccaaaactcaatacttccgagcatatcaccagaggcttgagactgcccagcgcactgttttggcccagcaacaggctgcgcagcaacagcagcaacaacaacagcagcagcaaggcgtcaacgctccacctcagccacctgtccgccggaggactactcagcctcttcgagttgaccggagacgatcttcgaagcatcttgctctgcttgatgccatgcgaaagctggccaagaagcgagaaactatgcttcagaaacagcagcatggtatgtttgaaatagacgcaggtcaccttgtgccaagaactccactgacatttcatctcttagcttcccatctcgcttcattgcgaaaagccaatgaggctaaccagcccaagcctccgatctcgtctccggctgagttcagccggttgaagtacgacagagagatgaagctgcaggaaaggcaggaacagtaccgccagcaaatgattgcgcagcaaagagtaagtggttgttaacgtccctacctgacagcactgtggcttaccccccatataggctactctcgccgcgcagcgttccggccaattacctaaccagcagcaaatgatgaatgtgccggggcgtaacaacaccatgcccccaacttccaaccctagcctacccagtgggactccgaatggaatgacaaatggcatgccctctagtgccggtgtcaatcaagcccgcccccttccaatgcagaacatgcccaatggcgcacagcccaatggccagatgcctaatggaatggccatgaagatgatgccgcaagctcaaatgcaacaaacaccaggggcacggccaggcctgccaatgcaagcctctcctgataacacgcgcgtgattcgagaagccaatcggttgcaggagcagcagcgtcttctccagtctcggcaacagcagcagcaccctcagcagggccagcaattccacaacccgcaatttgggtctcagggatcgccgaatatgagcatgccgaatgttaatggtcctcctaataaccctgctatgatggctgccctccagaaccaagggggaatgcagagtccgtcgttccatggtagtacaccacaaggcgtctccacgccatcacctcgtatgggtcagcccaatcctctttcgagcggtgttgttcctcaaatcagcactctccaaagccagattcaacgcacgaacccgaatatgccccccgagcaagtgaccaagctggccacggatcgactcaaccagtatcagcaacagcaacagcaacgcttgtcccaacaagcagcgatgaatgctgctgcaggtagcatcaacgcaaactccgttcaggccaactaccaagttccccacgaggctagtttccagactccgaacggtggttctgcaatgcaggtccctcaaaaccaagggttctctccaatgatgcgggttccccagcccgttcaacagaaccgcgtcggcccgactagctcacccgccatgaacggtagtgcgcccctgcccagccgtagcgccactcctcaaaaccagcgcagcggcagtgcccaagctggcgccgttcaaggttccaacaagagcccacacgctccggcagcccagaccgcgaccagctaggagcttacatgtcctccctgcaatacacttgcaaatcctttattcctccccacattaccttcatctgtacatacttacaccaacccttacgctgatttattttctacactttgtctttcaccgttgactcggattcttgcgctacaccaacacctaaacctcccccatttgttgacctctaccgcatgcgtgctctctatttttgcttggctttttgaaaaggatgttcatcatttatttgaacttcatatgcactggctctttttcaccaagtgctgctctgaattctgaattccgggctttggtttgtatcattgggaataggcgaaactggggcggacgaattactctaggaattgagatgaattgtatgattagttaggatttttttttcccaccatatttctatgtagtttaatttcaatttgtagctctgagagttataccactgatagcgccaaaccccgtccttccacctgtctcgccgactacttgcagtcctcatttatatgacttgcttttctaattacttggccagaccctcatgtgagctcccaattttatttgtgaagacatcaaggagcgagttgaaattagaacttatccagagagaactttgactaaactacatcccgtcaaagacgtattgatccaaaactagactatttcctattcaagtgaggatataacacacaaagtaaggaaagtataggtttattgtgcctgtatctcttggctactctcaatcttgatttgagacaaccctgcgaactagccctggggatttctgaatattgcaatatgaatactccgaacgaaagcgaaattcaaatagaaacaaccgactgacccaatgacttacttcatttgtcttgtctggccaacgaccaatccaataccctaggtggtttgggaactggtttctttttggcacgctttggcttcttcttttcatacatcaaccacccggacaccggctgaatcgaatcaagtccaggttgcctagtgggaatggccgcgttacagcgcttcatctgttagttatttcccacgaaatatagaagggttcgccggtaatcatggcctccagaaccatctagcatcgctccactcgaagtggcttgtatgccgatcaacccggccaacatcacagcgtcgaattcgtgtccaagattattaactagaaccagcacagagacatagcccagagggactttctctgtgtctacgcagcgtgacaaagcctcatcaagaccgaacttcgtgtctcgtatcttaaagtcttgcgaggatactggaaagattgactctgggtgaagcaactttccatcattactccagaaacaaaagaccgatatccagcctgtcagataggttggcctgctagccccgcctcttctgtccgcacatttgctccagaagctcagtacatccggtgcttcggggttgtcgaaggcagcaacgaagttgttaagaaccggtcgaagaagctgagcaaatcgagcaggctcatcccctaggtgagctagctgatcaagcttcgttgccataagtgcccagtcctcacgctggccgagtaaagtgacagacggaattccgcaccggatggtaaattggtatgagaaatacttctgtgtagagcctatcatcaatatagctgccaccacctcatcggatgcagtcgtggtactaaaggctggcataatccagttccgtagctccggattcacaatatgctcttccattagtttggtcatatccaacgccatttcaccaaagtccacagtgtccatggcatcatttgtgataatgtttaggtgtactgaatccttacgcgagacgaatagatgtcgcagttcctcggaatgtgctactatgaagaaactgagctgcgacagaatggtaaaccaaacatcttcgggccggagtataaggttgtggtgatgactatatgcgttgaacacggcccagacgaagccattttcggatgcggagatgtgggatgtgtccaagaagtctttggcaaatgagttcccgatcaactttttgccgtcgctatgctcttttggacaggatttttcgaagagctcttcgaccttggctatcctctggagtccccatgcacgcggtggatttttggttgttgtaaaagtaataggcaatttgtcgttgcggaggatgaagcttaaaggatcgaaaggaatcagagaaaataggtcgagtacttacttactaacctagagcataagaacgaataactacgtaaccttttaaaatctactccgtagattaatgcagtattctataaacaaccgagttattgcgtattctagcttctagtatctcccaaatggtaagaagttgacgaagtattctactctctttatttcctagaggcaagcagtgaaagatcactgaccgagagcagatcgctgatgttcgtactgccatctttcgctaataccgaacgttcgctctcttctagatgccgtagaagctttttgatgctttctgcccggccacttacatgcaggatgttgccaacggcagcatgcagctgtaggtactggacttcaggaagaggaaagcgaccgtcgtgactagtcaatgtgacaatcctgtcttcgtaatagtataccgaaatctatctcgccgaagacagtttcggctaagtcgctcttgttcagttcgaattcctggtgtgataagggagttgaggtcttcaaccgaatcgtcaaagctaatatggggggaggaagtgataacaggccgtcttcccactcgtagacagaagaggacccagcatcaatgctggcagctagttggccgagttcatcatcgttgtggcagccggaacatcctctgacaaattgacctgcccatccgaggggaggtatttgaagcaagtctcaaggaatttcttcgtatcggtgttgagcgcttggtagcttgcgagggtcgcctcccaaggctaattttgcctcggcataggtagagaagccgacggatgaaacagcagggctgagactactactatcatcttgcgacagcgacattgtgcgcgacaggtggcaagggaccttatatagtctgccacatggatagtggggtggtcgtggcgggtgaggattggggcgagccgcactcctagccaatgatcctcatcgctacctgagatctaccggttttgttggttttcagagccttctggcgagtacaccatattcagactgaaaagagagtaagaaagtgatgagggctgagtgacgtgagatggcttgaaagagtaaaaggtaatgccattgtggacgtaagagagatatcaggcgtctcttttgatgtcttttttgatgtctttctgtgtgttttctggaaatcttttccccatgtcaccatagccagaagagtacggagtaagaggtgctgagtcctgactttttgatgtctgttttcacctactggcaaaatcgaagtgcataaggcggtgagatcgtcgtccaggcagtgggcggtcaaggggccagctggacagcattccgccaggcaaatattcaccaataagagacttagcacggcgggcggtatagcagttcagaaggcggtagcacaggtgttaaaacattcctagcgcaccgccgtctataccaatttagccgcgcgcctccaattttgccaccgcccatgagctagtatcaattgctcctcgaggtcttgcttccctattaagcactccatttgtttcaaatcaaagtaccatcgcaatgtctacgtgcgacaataatgagggcggaaaaccgccctccaaaccaatctctatatctttatctagttcaaagggtccttcgaaaaagaccggtttcaacctccaatcctcaaatcgcggccgttccacaacttctacaacaaacggccagtcactgcctcggcgacctcaccagctcggcgacgctgatgagtccgacgaagatgaagcccccccggtccacgaggaaatctcaggattcgacattcacacaggcgtcgccattgccgcggacggacagacagtaacgggtgcgaagaagccactgatcatccccgtcacgagcaagaacaactggcgcgaccgggcgggagtcaatgtgaagaaaggcaagaagaatttgctgcctagcgaggtacaggctatgcaggaagcgcaaaagaacggacaagcaccccccggagtgcccacagtagagacagatacgcccagcgtggcgtacgggttgagctatgcacagcagtcagcagaccaggcagttactggcgcagcactgaacgaagaccaggccatgcctgatgcgaaacccgtcgagaccaagcctctcaccgacgaccagattgctatgcaggcgctgattcgagaaaccaacggggaggtagaacgtaggtcagaccttgtgattgagtctgctacaaaggacgaagaaccagttcactacagcgagctcggatccttccgaacagatgtggcatcccggcccgagcctgctactttggacgcctacaatgccattcccgtcgaggaattcggcgccgcgctattacgaggaatgggctggaaggaaggtcaaactatcggacgaggaaactacagcagtgccacagctgcagacaaggcgaaaaacccccgtgttccagaacgacgacctgggttcctcggcattggcgcgaaggattcatccggcggtaagggagctgaaaccgagctaggagcttggggaaagtcggctatgcgcaaggcgtcaaggaaacagggggaggagaacgataaggccgagggtgtgtacatgcctatcacgatgcggaataagaaaaccggcgagcatctcaccgaagcggaactcgctgcgctacaaaaggaggccaagtccaagcctcccaaggaagacgattggcgcgagcgacgggatcgcaaccttgagaagagcggtcgggacaaggatggagaccgggaataccgcaaacgcgactacgacgatgaggaggatcgttctcgccggaagactgggtcctcgcgacgtgaccgtgaccgcagtcggtctagtggccgccaatcttctagccgttcctctcgatatgacgatgacgataaaagcagacgggatgaccgttcctatcgggatcgagaccacggccgggaccgtcggcgggaccgtgatgatgataaggacgatcgaaggagagacggagagcgagagagagacaaggaccgcagccatcgatctcgagatgagagatacagcagctcgcggcactcgtctcactcatcacggaacgacagagaccgagaccgagatcgtgatcgcgactctcgtcgaagtcatcgcgatgattaggggctagattttttggcgaaagattaagggtattgaggcctttgtacacgaccaattgctgtttctttggagatacatattccctccatctagttattttaccatgagactcaaccaaaagagataccctgaacagtcaaatcaaaatatatatggctttggccaaagaacactttccatgatacactgttcaattctataaagagatggcttttatccttcccacccatggtactccaagaacgaaagcgccaaattcaatgtacaaacggggcaaaaggctaaagccagactatgcttccaacataataacgtccttctcatgctctccctcgtcgctgacattgcccacagtcaaatcacgaagaccaccaagtccaacgccaccatccatctcaccgagaacccactcaaccaggtagctgtcatcgaccagctcctcaactcgtcggtagtgcctctcagtgtacgcagccagcgcctggagaatatccttcagaccagccgcggcacgaccctccttcccgcggacggactgggtcgcaagctccacgaaagtggacgcggggtaagagcggaacagagcatacaaaatgcgctgtgacacgcgcgaggtgcgtgcattggtgttccagtcccggagacggagcaggagagtgcgcagattggcagggtccaagttctgcagtacctcatcaatggacgggttaccggacagactggccgcagagcgctcgcggtcctcggccgggagggttgggtcgtctgcggtgttgatggcggaggtgaagagcgagagcaatctacccgggtggttgagttgcagggccagggtgatggcttcacggtaggcaccggcgcggatgtagttctgcagttcttggtcctgttcgacgcgagcagaactggcgttgacagcggctgtgtaggtggatgatgtcgtatcagtccagaaggtcactgttgcgtcggcagaaccggaggcaagggcgtagggagtggtgttgaacttggaggagattggcttcacgtctgcgcgtgagccggacggagttgggctggctagcgcccagactcggtcgatgtggttgtctagggtggtttcgagttcgcctgtgtagggggaccatatcttgaccagaccgtctgcggccgcggaggcgataaggggatggtcttgggtggcgtttttgcgtgctgttgtggcctcttcgtcatcctcgtcatcatcggtttggttgttcgagacctgcgggggtgggagccagaggactttgagaacactgttggtatgaccctcgaaagtcaagagacagctgtagtcagacagactccacagtttgacggtcttgtcaccagagcctgtgactgctaggccacggcttgtgctagtacgtgaatctgagttgatgatcggtgtgccctgcggggcgaatcgcaccgaccaaacacctcgcttatggccacggaggacaccaaccgacgagccttcgtcggcggcccagatcttcacggtgcgatcttgtgatgctgaggcaaatagctcggacgtagaatcgacatcaatagcattaatatctttttcgtgagccttgcgagtatagacggccttaggatagtgtggcttttcttctgtcagtggagctaacttgcttgtatcccatcgcttgattgtgcgatcttgcgagccagtgattaaaaatgctggtgggtggttcaaggggtcgttatatgcggcactgccaacaggaggtggcacacgcggcagggcgattgctcccaacgattcggcgtggccagtgaatatagcaaagcaagtataagaggatgtctttgggtcaatacgccaaagacgggctgtattgtctttggcaccagttgctagccagtgtcctgaccaatctgcatcaatgcaaatgataatatcgtcgtggccttccaggtgtgtgacatcagcaccgaaatactcctctccctgatttgagggtcggtcttccgagggagcaaccgaaactacacgaatgctctcggtgttggtggccaaagcaagcatagatcgatcaggcccaatgtaagccagatcaatgatctcgtcgtcattgccggaaatacggcggataatcgccaaaggcttcaaagttgaccctggcttataatcagacagcgactcgagcgagtggagccgaagagtctgatccgcatgaactgtaaggacaaaaggcaaaccaggggaatactggatagcgacgacgctttcgaactcctcgccagcctcttgttcctctgtgatctcacttccacgattgcagtcccaaactcgcaatttgccattttctccacctataacgcacagactgctatccgcaatgaaagccgcagcttccacgctctccaaaacaggaatgattctgcgagtcttccaagtacgcgcatcccagacgatgacagtcttgtctcggctggccgagatcaatgcgttctctgacggagaaaaggacaaactgcggacaagtgaaacatgtgactcgagcgacgcaatggactttctcttgtgcagatcccatacacgcattttgccatcttcactgccagatgctaggcggaatcctgcagtagagcccgtacgggcggagctttccatatcttcatcatcatcctccgcagcttgttgcttagacttgttctttttggatgacttcgcatcgctgtcggcagtaggaacctcgaaaaagcaaagcgcagaaatgacaccaccgtgaccatggaaagtgtgagtgacaaaaccacctctgatatcccagaccttgattgagccatcagcaccaccagtggcaagcagtgtaccagtaggatcaacagcaatggtcacgacgggagctgtgtgaggcttaagggttcggagaagttttgcttcaatggtctgggaagtctcgtcaaaagttgagaggccgtagattcgcatggacatcgagcgcgagcagacaatagcgtgtgaggcggaaggcgtgactaggcgaattgttagtgcgctattctcaattctcaaggcatagaatacttactggccaaacctgtgacaatttctccatcctgtagcgattatgtggttagcgctttgcaattgacgaatatcccaaggcgacaaaacatactccttccaggctagcaagctggttgccagtctccaaatcgacgatcaatgcatcttcgcccacgcagctcagcaagatgcgcccactggcatccagcgcagtgctaccgccggtgtaaatggggcggagcgtacgggacgcctcgaaagtggttttgacgatagctttcgacatgactctgtaatatatcggcgtaaaaaagcagaatttagcacgccattggccagtcgaagagccgtagagattgaacgatcgcaaaaaactgcagctcgagcgggcaactttttttaatgtttgcactgtttgtttggtgataagatacggcttctgcctcaggccaagggcagccgcataaccacagtaaccacatgctcaactgctggtgtttgtctgattgtgcttcatcgcctattacctttacatctacgggttccggcaagttttgcacaaatggtgtactagaaggcgatgtgactacaccactagcccagtgaccttgcacgacatgggtagacaggcttatttgaaccggctcgcattggtaagcttcatgttttactcaccagcttttcctatatttgcagttgggaaatcttgggtctatgggctgtaatccaacttgtttcagttcgagaactttatggctttctgaaaccgaaccagtcaccacccggccttgtctctttgttttatcctgatatacaagcccatcccaaacgcatcttcccatacacgcagaataatgcctagttacaaccggatagtataccatattgactgattttaagggccggtccccatacgaacctcccgacaatgcggcggttgacccctccaatccagttcgacggatttccaacgtccatgcagacaattatatgcagcaatatgatactcgagggcaccctgttaatcccgagtctagaaccctcggaagagaactccgaagagcaaagaatgacatcctttcaacaatggggattgtcgtcagtggagaagaccgaaactctagcatccccaatgaacaacaaaagatcaaccagattgcgagtgaaaatgacttcgggctggtcataacaactctcgatcaactgttcatctttttcggtacctggtggacctcttcagtcaccggtcgagtacaggtaaatgcaccaagtaccttaggtgttgattgggctgacattagagacttgatgttcagacttaccgacattatgcccattccgcattagtcagtgtcgtacagtctgagagagacaccgcagggattcttagcttctatttttcgggaattcctgcctgggcaatgtccagtgggttggctatagctcgtgaaaccccgatgaaacgggtgtttgtctctctccgggactacgttcaatctttgacaggcgactcactcggtgttcgttctcttttcggggttttttatacagcgtgagtatctcattcgcccgttcgaataggaaacacaactgattacgaataaagggcgagaaatgctgtgctcatattgtctatggagttctacatgtactccacacttcaatccctttcccttgtatccccatatggaattcctggcgtgcaattcctgcttcccttcagcggagaatccttgctacagctgccacccttgcccactgatttctcccctcagtcaatggggacctcactcgtgaaattgttgctctcccctggcgctttagtgtttctctatggctactacctgcgaccagagcttgaagagcgcatatatcggttgatcagacgacaccttccgaagccagctcttcctgatgaactttcagtccgcgttgcctttgaggaaaatctgatcgagtgggtagtgcccaccctgggccgcagatcagtcgaagaattacaccgcggcaagctcacactatttgaagacatcaagcttgaactgtccatgcttcgaatatgggtatcatcgcttcttagaccgagatctacccaaacgttagagcagcaagctctcttgtcctttagagacgaaaggattcaaaatctacgcaacacgattgagctgttgcgacatgaactcggagaagacaaccttgtttccgatgcaggaccaaatgatcccgtgcctagaccgccggggattactcctgatgcccaggttgccgctcttgcatcacgagcacgaccacggccgcaggatgcaacgcatttgactcaggcagaatcagttattgggctgaatcaagtgcttattaacgaagatcgtatgtctcaatcgcctggggaaatgagcaatgactatttctccgagatagctactgctggacgaacgagtcttctctcggccacttcaaccccgcaggaccaaacagcccctttgcaaaatggtgaggaatttgctatggaccgacagaactcgcggtctaatactctcttctctcacccatcatcaccagaaacatcacctcctacgtcgcctcgcgtaagagcatccttgattcaccagagctccgaagttatcacgatgcagcttgagttgatgggcaatcggaaccatcagccccagacccaagctttaaatcccgcccagctgaatggactggcacgaaatgatatgtcagggtcaaatacaactccagatgccatggacagacgatccatagccgagttcctcgaggctctgatcttaagtcaggcccagcgtcaggtccatcagcccccggcagatacggacggcctctcaaataccaactccgggccatccaacacaaccccccaagacttaggtgcctctggattagaccctcaaaatccggccccagaaactcaagccaccaacgctccagctttagagtcaatcgagggagcattaggatccatcgttcagaacattctcccagatggcgtggaagaaccaaatgacgaagagccctccaatgaatcaaaccctgtcccagataatgaagacactcaatccgacaaccccgtccagccagtcctaccctcttctttgattcctggacaaccgacaaacacatcgtcgcaagtccaccgcgtcacccttctttcggcatacccagtggactcactcgcatctcatctcgctgctgcaatcagcggcatcatactcgcgccacttgaagcactataccttcgctcattgacccgatcctggattatctcacatccttcctccatcacccgtctctcagatgttcatccgctgggtctttggtttggcggaagaacttggccagatatgtatgcttattcctgccgactcgtgctcatgaggggaatgcaaattgcgatgagagcgggtatatgggggttccttgtgggctcgacaatgaggattgggaggaagttctgcggctggggaaccttgtgatgaacccttgtttctttaagccgcctagatacctaggtcactctaccatgtttcctctattttctcgcactctgtatcttaaccataatattactttaatccatatgcaacatgataggttgatagttgtttccatcagtcaggctgaaaaatttagtaccaatgtgttgtatttcttttgtcttctgatgcagcatttgcgtctactttaccgaacgaacagtcgaagatatcaaaaaaaaaaacaaaaacaaaaacataatttcgtcattatttgagggtacattgcatttgctctcaaaagatacatgtaaacacgtagaaggcaatagcaagttcgcagcccgagccaactcctcagataaccatctcagatcatgcacgcccctttcctttgttccctggcaccttacgccgctcccaaaccataagatatccctcacgggcgaacagcgtctcgctttccgcgcgcttgacgaacaaatcctgaatctcaagccactctggaccctgctgctgcttctctgtggaaccgccatttttggcgcgagtgttctcagcctccatagctttatcgtgaagttggacaagccatgacaccttctcgctgccgccacctgctccactggaggaaccgccggctcctgacgcagagttaacacccttttccacagcgtcatccattgcaccgggtgcggcgatagcaggatcgaggatgatgtttgcgacaagatcatagaggattggatcacttggtgaacaaacatttggatttggctcgacatagggggacatatccaaggagtgcggagagggaaaggtgacaatggttgggtttcgctcagagacaaaacggttcttgctgaagcgcttgatatggaagaaaaggtaaggaggaagagggtggaggagacggtgtcggacacggtgagccagtttctctgacgccgtgtagccgttatatttgttcaggagggtagtcaagggaacctgtgggatgatcgactcccgattggcagattggaagagaggtgtggggggtaggtccagtgtgagaatgaggaaaggagtaacctggctattgattatgccagattcagtgaataccaaacgggcattttgggtgtcagagtgagcggtgatagcttggctttcgatccgtacacgaccctgaaatgctgcgtgaacaacacttgtgggtgttggtgagggcttcttggatcctcctaaggcgaggtgcaggcagttcaaaaaccaggacaagaagtccacaggatctgcctggttcgtgagagtgaaacgtttcgaggatcgtacggcaatctcctgtagtaactcgtgcggagacacatgtgaccggaacgctttagggttccatagcttgcgcaccagcgtgctgaaacgaagaattatctctggtgtgcctggtgtggggaactcgtggagcagaaagaaattgcgaattggcaaaacatgtgccagtagttgagcgactacattgacgtagtcgttggctttgatgttgttcataccgacaaaccctgaaaagagacaattagctaaaagagtacttttccgtcctataatggtagatgctcttacctggtctgtactttgaccctgaaaggtcccaggcatcatgcacttccttatcgagtttgaccacttggttttttgtgtagtgtggatcaaccacatacttgatatcatccaaactcttgttgttgacctcgtatccttcaggcaaaacgtagaccttcttcgtgccgatgttgatgaagacgtggtgtccaacttcaagggcgtgaaaatatgcatgcgatttcggaccacgaccctggaagtatttgccgcagacgaggcatgcgtacacattgatgtttgacaaagtgacggagcacagcttctcgaaatcgaagtccaaaatttcgcggttgatcgtgtcgaggtagaggtcgccgtagccttccatgggagcgctttgccgcttcggagcgctgagtgcaggtgcatcttcgtcaatatccgagagtccaaggggattttcgccctcctcaagctcctctctttctatttcagctgctccttcgatatccacgccattgagatcgtcctgtgtcaactcttcgccgctcgttcggtatgcgggcactgcgccgttgcgagaatcggggtcgttgccctcctcgacgcgcgcccttttcaaaacaggcgagccagaggaatcttgctccaaggggagctctgcgtgtcttttcgacattgtgagatggtttggatcgaaaagttggtgatcccggggttctggactttccgatagctcgggatgcgactgcgttgcaaacaagtcaaacacccaggccaatgccaagctgtgtacgttctactccgtatacaaactactgttcattttgattataggactgtatttgcctattacttatccaagattatctaggaatctactccttacttgacctccgagcttgctacagcctaaatcatgccgaccgttggattatcccggaatcaaagaaaaacgtcgtaagatgtgatacaacaaaccccgtcgtttgtcgaccttcaagcactccggaccaccttatcattatccacggggacttcttgcacgccatcctttgtcacgaccttcactagcatctgtagataattgtgtcagaataacggatttgctcatggcgtttgaaagaacttacccccttgtagtcaaagggtagtcggcgcttcagctcgtctgtgcacagggtgaggagcgcaaggccctcctcgagggagcagtcgggatggtgatgtttgtcaaggatggagaggcagtagtatctagcgaagtcagcatcagtgatctcttgcctggagtttcgtccgtcatagcaggccatgaaacatactgggcatagccgtgggcagcatatggtaggggcgccagcgacgctaggtaatcaatccagtacaggtgaggcttctcagtgaccggatctataccacctagcagcaggtttactgtgtagggactccgtgaccgcaagctgcgcgccaattctccacggacgaaattggcaacggcggagggactgagctcagtatcattgcgcatgctgtagagtgcagcgttggcttggatgtattcggcaaattgaactaacataggtatatcattagcatcttgtttgtctcatcggagaagctacataccggtatctccagactcgccagagaaagccatcaatgtgttcttgttcaactgtcgtgtcttatcatcctcagccttcagaactgtcgggcctctcattgcagccttggatgcagcaagaatgacgaagtccttgccggcgatacccaaaagaacctccctagcaaactgttagtgacgttttgtatcgacgagatgaccataaacttacatgtttgcggtatgagagataaaagaagaattacaagcaagcagatgatcagagaaggcgaaggggagtagtggtcaagtgaggaggaccgcgcggtgagcttgacgcctggagctcccgtgaggtcagctacccgctgagtcagccgccgcttagcgcttttttttctgccaaaaaaaagttgaagttttgatctccgcagtccgagtctttcgagaacgccatagattcaatttctttatacagagatcaagcaccgacaggcttgacaaaagtcgccatgtcgtccttttttactgtacccaattcccagcgcaagaggaagagagacgaccgcgccggagccccaggatcaaaaaagcgaggcgtagatgccaaaaccgacggtggtcgacgcaccaaagacagagaggaatcgatctcgggcagtgacttggacgaggatgccgcaattgatacagcagagtcaggagacgagagtggatcggactctgaagatggcgagaccgcggcggatcgaagattgaaactcgctgaacgctacctgagtaacatccaagaagaagtcgacgaagctggatttgatgccgcggatatcgaccgagacttgattgcggaacgattgaagaaggacgtcgacgaatttaaaggacggacgttccgtcaaatcgcagcgaaactatccgttcccacggcgccccattcctttttccgctcagatacccagtcaaacaccgctatcgcagtccacccgccatttgtttacattgtttccaaagataaaactttgaccaagtgggaattggctacacccagtgtaccagactctacagaattgaacggcgataatgatacttccaagcgggctccgcgcccccagcgcaagaagcccaagcgtgtgaagtacgctcggggtatgcgcaaagttggcgaatcaggcgaggatcaaggacatacaggaagcatcatatctgttgctgtctcgccttctggaaaattcttggccaccggtggaacggacaataagcttatcatctgggatgcagagactttgacgccaagcaagacctttttgcaccacagggactcggtttgcagcttgtcttttgcacgccatatctcggcgatgagttctggagagcagttgttctccggttcgtacgaccgcacaattaagacatggtccatcagcggagctggccacgcgtatgtcgaaacgctcttcggccaccaggatcatgtcaccggagttgctgccatgaccattgacgaatgtatcagtgttggtgctcgggatcgtaccgcccgcttatggaaggttgtcgaggaaacacagctcgtgttccggggcggcgcctccagaaatgccccttaccacgagagcaacatcgactgtattgcccccctcccacccactcacttcgtcactggctcagattccggctccctctgcctttggtctgtccacaagaagaagccactctacaccgttcgtcttgctcacggcttggacccgatcccccctctggatgtgttatcacccgagttagacgaggcgactgccgcccacaacacgcgccacatgcgcccaatgcctcgctggatcactgcactcgctactctaccgggtacagacgttgtcctcagtggcagctgggatggtttcatccgcgcatggcgcgtctcagaagataaaaagacacttatcgctctgggacccatcggtgcaggcttacccggtaccgtgacaccaacagacatgccctcgcagcaactcaaacagaccctggctcttgataccacccctgtggctgatcaaaaggagccagagccattgatcaagggtgtcatcaacggcatcgcggtctttgaacgacgccctgaatccgatatgcctggagctgaaataaaaaagtccgagaccgagcacgaacctcgtggtttgtccatcatcgccgctgtcggcaaggaacaccgattggctcgctggaagtgcttcaccaacaatttctacgagggcgccacttcgggaggccgcaatggggctgttgtcttcgaagttccgtttgctactaatgacaccgtgaaggctgatgtataaattttgttcataatcttcttgtctcgatcttggtcattggccgaggataaaatggggagcgttgctcggggtcaggtgtatttggagtcacatctgtgtattttaccattttgcatatgtatcgaatttcttcggtgcattgaagtatttcaatcatatccccctttcaagcaacattgtccctgaagtttacacttcgtgattagggtaaacgatctgaaaaggtgcataggtacccgtttataaccttgcttccctccaatattgcaacgtgcgttatttcaacaaccgataaccaaagactcctacgacttgcctccgtgatgttgagatgtttgctggccgtgcttgtcagtttacttcgcttgtggatagggtatccaccaggtgggtcagtggtaaatctatttgtctactctggatggactcgtggactgttgtagggacatgtggttatcaaagcaatatgagcaataacaatactcagcaagccagtaagctttattaattcggcgagggattagaatatgagaatcaaggatttaatacggtaaagcccggtgtctttttcataaactttgtggtcactcttcagttagtgccaagagactaggttcgtcgacttcactgggaaagggcgacaaaagatcaagatcgaaccgaagacggataagtaggggtattgtattcgtggaatatggccgagccaataagaaacgaaacatgaagggtccagccattgaaggcagcagaagagaaaaaagaaagagaaaaagtcgcccttttgatatcaaaatgaagacaaaacgccagccatgtccactctcctgttatcattacccaagcgccgcgctgaagtcaaaaggaaacattaagtaggccgatgaaatgcgaaagcagatgccgcgtcggcggttggaagatttttttaatatggagagaatctggcccgtcgcctctgtgtagctcttctcactgggccgacaggctgatcttcgtcggagtcatcgacggggatcgcattgtgagcagtggtcccatgtgggataggacggcgcgcaccgggtctagcaggcctaataggcggcgaagattcctcttcctcggatgagtccggaattgtttcaggtggaggcctcgctgcaagccatgaagcatcgttgggggctcggaaccgttgtggatattgtggattggcttgacgaggccgtgtagtctgaattacgtcttcgtcggattcatccgagtcttcatcgaccatctccctgtcgtccgaatcctctgagacttcctcttccacctcttcatcagaggaggcatcggcatcaaagtaaggtgtggtggttctgtaattgagcgcagtcggtattgaatggcggccaccctcagcatcatccacaacggtgcctgtggaacggtctgattccgattcatacatatcgccactcccgagatgatgggcttcgctttcaatgaacgaactcgtgggcagatggtcatcaatgaatgagtctgactcgtcatactcattctcctcctcctcttcttcttcgtcatcttcttcgtcgtattcacttccattggtgttacctgaagcgagatagttgtcatgattcactgggagcggcgggcccagtgggatcatgggaggtccatgtaacaagttctcaagccggtcgaaaagctgccggtcagcacctggatgccagttaggacgcctagggaaggtaggcccgtaatagtgaagcgcaaagttgccccagacgccatcctggtcttcaatctcatccaagtggtcagactcccctagctcgccatcgccctcgccctcgtcctcattctcgtcctcaccctcacccccatccataccatcatccatcgagtctaggtcggtctcactgtagtcggccgaatcactgtcatctgtctcagaatctggccgatactgatagccacatgatgcgcaatcgtatccttcaagttcccacgagcagtgtggacatcgaaccactccgtcttcggggtcaggtttgggtgggggatctttgggcttgaaaagacctccgaacagacctccttcggttggatgattgttggccttgtcctggtctagtctttctgcttcgtccttttggttttttgtatgctctgtagtcgtttctcctttgtctaaaagctcagctcgacctgtgaaaatctgcacaacggctcgaacctgtaacacgagagatatgtcagatacaatgaaatgattgaagattatcaaaactcaccagataagctggtgctggctgggttttgacgggtgcccggcaatccgggcatgttcgctttgatcttccaccagcaaaccatgacgatagacactatatgaagaattatggtcagcgaagagaattcacgacagaacaagtagaaaggactcactgagtagcagaaagtatgcccgcaagcgattgtaaacggttcgtaaaggggacggatgcatataccacactgtatcagagtgcgaatatcatcgacatggccttgaagagtgttgaccagctagattacgcgcgtgagtttttaggtcacttgaatcagatgcgggacttgtcttactcccgatgcctcagccccagaaccacttctagctgccattttgaccttctagggctcgtcgagagctgtggtttccacactaggagcgtggcccatcaaccgaagtgcgtttaaggcgtattggggtgatgcgcgtgtgtcaacaggtacggtgggggtcccggaaggtaaaagtttcgcgaagtggcaaggtgtgatcaacagattttcgcagagacgaacgctaggaaatcgaggaacacaggcgaggatagcgtgacggtctgagattgagagaaagacaccgggaagagcaataatatgatccagattctttaagtgagagggcaggtgttttgtggcctcaggcagccatcacataatcatgaggaagggggcggcgcttcgagctggcaactttggaagtgactcgtcactttcttttatcgatggtccttatgtgacagtcacttctttgggacttctggcgcttgtttaaaggttatttattgtgaaaatagtctgcgtgacaagtgcaactatacctctcttacaggtgagagacttttctatatgaatgaagcctcagcaggtcttataacacaaagatgttacccttgtcttgacttcctttttacctttattgttggtttgaaatcaggtgagccaatagataattatttctattcaataatatagctgatcgaagcatatatacctcacttgacatatacatctcgcaccaaccggtttactccctcgacagtctccgaggcactcacaaagactccatgcagcatcattcaagccgaagcctttgcttgaactcgaggccttttatatttttaacatctgattaacttggagagaacattcatttcatatcatatcattatccaagcgattgcctgcatctcttgagatcttcttgagtaaaaaccaacatacaacttcaatttcctgacgaagattaaagcactaaatcatgacccgaagccccaaacgaggcttgcaagaccaaaatgaacaatcatatcgttcaaaatcaatgatcatctcattgcgagctcttcagagccatatggccaagagcaggccaaatatttttcgctcccctagcactggtgtctactctgtatcttatatctttgcttctctgccgcatcatcaaggatccccaatgtatcttccttgctactcacggagaagttgatatggtcaatcgaagtctatggcagagacaaggtcaatatccgcattccttgagacaatgtccagagccttggggcttttgtatgcgtcataataaatggcgcacatctttgaatggtttcagcaccttatttcattgctaatcaatatggtgaattcactccgctgcgtatcccccccgcaattgatattgggacagactgctcgaatattcatacttctttcgcacctctgggttcaaaatcccctttatcatttgctggctagtgagaacagctcgggaacactaataaagtgtttgtgcattgctttttttcaacttccatatgatcatttatatgttgtagtgctcgtgaatatatatgtggagtataaactaggaagttgcattctaagaatggaaatgtaagctatttcagtggatccacaaatcagacataactagaagccatgtctatttagatacttcattctagacttgtatcaaacccaaagtattacataaaaacatggtgctagttatgcagacctcgggattctacatatggcagatctccgcgccaagactgcggatccccaattcttcttgcgtccagcgctaacttctgctccaatcaacctctacctccaatctgatcttcgagcaacgctttggcattctattctatttgactatatcatttacctaaagtgtccattgcaaagacaggagcaataagaactcattgcacccatggcggccgagtcaacacaaggagacactcacgacaaagcgtgggaaagagcggagaagaagttcgcacagtatgtttcaatctttcttccctcctctatacttgtttgtccattctcaaaacatgatctggcatgtctgaagccatccgtgatcgcgggatcatcttacacggactatggggtcttgagagccacgcatagcaacacaggctagcccggtggttgcatctattcatcgggctgaatacacgtggcttttatctatactggtagctaactagctaacttgcgatattagtaaaaatgctagcgagtactacgacccatgccaagacttcgcagatcggagtctcaagtgtatgaaacggaatgcctatgagcgcgaaatgtgccacgattatttccagtaagtcggtaattattctgcgatttaattaagactttgacttgctttccgtgcaatgtactggctttcgatccacttctggccagcttgtacaatattgtcatgattatcatatttgagctttcacactgactgatgaccttttctagagcttatcgtgattgcaaaaagaactgggtaagttgaatatgagacctttgccatcacctcagcaatctcccgtctcgggcaggctatccgcgagatccattaactttgattcgatatgcgttggagcatcttcggtcgctaacaaggcacagctcacccagaagaaagtttctgcaacgcctcagcccaaataagacatctctttcatctggaccatccttatcgaaaagatcgacaactcctgactggcaggatccctgacatccccgaagcagttgttgcatgccgatgcgtagggtgtgctcgttgattaattcaatattcagaagcctgtcaaagctaaactcctaccttttgttcaggtgataagcattagaattgctgtcgggcatcatgatattgctaggctggtaagaaattccattcctggcacgtcgaaacgcttcatcgtccggtgctgacttgtgagagaagcagtttctctattgaatttgctttcctgcttttgaatcgcatattgtactatcttttgaatgattttaagcttgtatattaacattttgctatggtcttgtctatttcgcacaggtgtagtgcttctgatcttcatattcggtcgagtacgactcgtgcagaatatgaaacataactccttatttatattcacaaggtagtcacctgctgtcatgtaaccaacaatttgttaacatgtcccggttgacgtccgtatagacttcctgggtttgttgtcttctaaactcttttcccctttcgtaatgacattagtactccatcttgacctcgctgctaaaagcctgattacgtcaaccatccgggatgtcacttcgtcgcctaggtatgatattgaactatcggtccacctggaatcaaatgaatgaataatggtatggatttctcaatgagtgtgaagataagaagcagaattccgcccgaccataccgctctctaagagagacgacagaacatcgaattcccccgatagaaatgatcctcttgatattctctggaagacagccattcttcctactcctccatctccattgatccggtcgaatatcttcaattcctgtcttcaaattgattgatccccttaagaccagcaatcaagagaaatcgaccccagtgatgtaacggaaggcttgttcatcaagcacaacatcttgcatgttaggatgtcggacaggaacgttgaatagagcacaatacggtaataccattggagcaccaacaactgtggtcttggtcacatcaacttcagtacataaatagtgctgctgcatgttaggcggcttttggaggaggggtggcattggattctggcggaggatgtcgatgtaggctttggtcaagggtcgaggggcaccgggcggagcaagctgccattgctcaaaatgtatagccgtcttcttgacagagatgagaatcacaatgcgcacttctccattagaggctctaaacctccattgagaatctttaagtagccttggtaggctcccagagacccccgtttcgataaccagggtaggccattgaaaacttgtactagaagggcaacgtgcagaggggctgaaaacttggtctccctctttgccccgtgataaggaggtatatcgtgtcgctccgccctaataatattcattacttagtctcatgctgatcagttgcagagtgactctctgcacgagtgccgaagtggtgaattcatggcgatgccctggtatcacgcgtaaaatacctgtactaccttcaaactcaaaccggtagttcacacccttcaaacaatcatgatcctcgaagagtcgctccgagatgcgatgggttgtttggagtagaataagaactggtttccactctcttcctcgtctttttcgagggtctcggcgatcttctcggcctcgagctgaacatatttcagtcggctgaatgtgcgagtcacggcaccagatgggagcgctgtcatgatgtcaggcatggtacgggcgaaagagcatcggaggacatgatatcagaggaagaaattcccataaatatgggacgatggactccgacccagaattagatcgatggacttgtcatttctatttttgagatacatcatggcagtatggtgaggggaccgactgaccgcctaccctttggtcttcttccccaccaaataaaaagtgaccggagtcgatcagtccactccaactcagatcattgaacttttttagcccatgctgtgcttcgcacagtgatcagatcgttctgcgaaaaacgccaattgaagaatttccctgcacatcgagcaaaacctccaccatgagctccagcaatgacgcggtgtttctgcgtcgtaacaaccaaatccaagatgccattgactcccagaatatgaagcaggccttacagctgattgagaagcgcatgaagaaaggcgagaacactcatttcctgaaggcgagtgatttttatcattgtactccgaattcaccaccactacgacgtcgttaactgtaaagaaccaactaacacgtgagataacaggcctggaaagcgaatgttctcttcaaccatgcggatgtgacacataaaaagaagggaattgcagaaaccctcgagctgtgcaaggccgatccaccgatctcggatttagactctctcgacatactccacagtacgctgcgaaatatggatgactataccgagcttcggagcgctatatgggaacgagcagcgaaggcaaagccacaggatcgtgatcttcagatgaggtggttcaaactcggctatgaggctggtgattggaagtcagcccagaaagtgagttgagacgaagcatatgctacaccgggatcatatgaaggcctatgttgctaacgagtgcctcctttcttataacaggctgcaatgagtctccaaaagaactttcctcgggagcgaaagtattatttttgggccatcttcctctgttacctcgtttcggatgacaaatctagttcggacatggaccgcaagttgtttgggacacttgcctatcgccttgctcagaaagcagtagccgaggttccctctaacccggtatgtgacttttttccaagattgcatgtcactggaagtgaagacgaatgaaaattttggacataaatgactgactgattcaaatgatttactacagaccgaattgctaagccctccgagagcgatacaaaccgccgaggaacttctcttggttgttcgaattctcgaatcacagtctcgttgggcagagattgtgcaggttctcaatagtgaaaatactggtctcagctctcggattgttaataacgacaggaccttcatgttagccaaagtcactagcctgggggctgccgaactctgggaagaggggcactcatacgtcaaaggcctgcttaccgtgcctgaagacgaagcagagcgcaaaactttgcatgagcgggatgattggaaatactggaacttgctcatcctagccgtgcgtcgtcttgaaaaaagtccagggtatgtcttccaatatttttacttctacaccatcaaaccctcagctaataaatggttgcttggttcataggctactttccgatacgcagcagcatatcgagaagttcatcgaattcagcccaaagtcccgcaacgcgcacatcgctattatggacatagtcctaaccggattcaagcggggcgagcggacagaggatgatctggttattgcgtgccaaagatactttgaccaacacaagcacaaactctatgcttttaaagacttacgaggggtcttggagacccgtgatgatgccttgattcaccgagtagcccaaaattgcttggacagtgtcgaggggaaacctgtacgtgcaaattctgctaaactcagtcaatgcgagctaatcaaaattctaggatgatgccattccattgatcaatgcgtacaagctgcaatactgcgaccggatttcagccaataaaaacgtattgaaatccagtatcgagacccttgtccgcaattgcctttacttctacgatgcattcacgcttttagcaaagacacaggacaaaaaacaagaaagccaaccagatactgcttctgcgatggaaagccgacccacagatgacttctgcatcattgccgcaatggcccttcttcagcctaacacagctggccaagcatctgagaaagtcagtaacactgccctgattcgcgccgccgggattctggaacatcttttaatcgactcacctcataactacgaggcgattcttatgttgattcgaatctatcttcttctcggcgctggctctattgctttgaggtggtttggcaagctgtctatcaagcagatgcaatatgaaagtgttgctcataacctctttacccgctttgccaccatccaccctcatcccgcgcctcttatagagggcggagaatacaaggactttgacgcgcaagttgcattcattaccgctctcgacttttatcgtcatgcaagcttcactatcaataactctttgataaaaggacttgatgatgggacttacgtgaatctagatgacacaattgagcttcaaaaacgtatcagggacagtatctgccggagaatgtgggcactggacttacgacggatgcaaagaatccgcaaaggaaaccacttggcccttcacgaggaaatcggtcagcaattctcagtctcccatgtactcctgacatacttgaatactaattaccctatagcccagaatacatcaccggctcaagaccagcggaagtacgatggtttcatggacctagaacgttgtggcaaacctgcatttgagcaccgactgcgcgcaggtccggttcctggggtaagtttgttggcttgagtgacaccatggcaccgactaatgtgcatataggaaaattggctggcgtccgcccggtttactgatcgacttttcagtgttcttgagagcatcggcagtcagaagccagtcgtcttggagccagagctgcctgacatcggcaaattatcgctctcccagactgatgttgatcacactggtgccgagatagatgcagccaagattcacgtagaattgttgaaagtggctatgtttatggctggatcgaaggcccatacttccaccgaaattgagactgttcttggcgagatagaggattggttgaaggctaagaaagaggatctagctctggaagatactggaaattctccccttatcatgaggacgaccgtccacttcagcccaggcaccccaggtgcaccgacatgggaatatttccataccatttggaccctcgtggagaccctcaaggctctatgtaatattttcaacctgaattctcgaaaggctgtgaagaccgccaaactccctgccgaacaaatgaacggactgaatactcttgttcgtgaagttttcgaggatatccgtttgaacacccgaagtctgaaacagagccttattgaatcagccactctcagtacactcattgacatggtcaagcgtggggatacaactgatgagtacgagaagccgcttcaagaagtcttggaaaaggcgatggacgagtccgcgctcgaattgttctgcggagaactgagagagagctgggaggaggcacttgacggagtgctggctgccaggctctaattctgaataaatcatgtgtctatgaaaatacattgttagagtacatgtaaaacaatccatgagagtgttgatatcaacaagttcagatgaagtccaggtagtaagaggttgatctataaaaggagggcaatatctatcacgtgcacatgtcaagccacatggacttagttgcctgaggtgtcagtaatgacgctagtcccgattaacccagccctagccctagtcactcgcctaccgcaccaacgccaaggctccattttgcggttccaggcaaaagaccaggcgaatttcacacggctctctcacctcctcttcgacaacctccgccaaccccttcagtcaacaaccgtcgagatggccgaacgctccggaattgtggtcggactcaacgcgggccgggtacgttcttactgtctctttgcaccatgtttgtcgctcgtttgaaggtctcccaaggtctcttcttttcgttcgctctgttggtcaacacaagatcagtcgggtcatggttcattgcggaatcactgggaaatcatcgcggcaagaaggattgcgaataaatcgccgaacgaagaatatcagagactcactgggaaaaatttcgatgtcacgggaacaatattttgaattcgactttggcaccggtgccagcactcgccatgcacgcaaccctgatccgaccacgctatgaaccaccccgacagacagacacgaaccgcgaattgaagagaacattgggacctgcggctgctacatgaaacttggcgaaacagacatactgactgggtcctgatatagaaaaccaccgccctcaacacccccaagacccgcatctcgcgcaccaagggcaagtcttcccgccgcaccgctttcgtccgcgaaatcgcccaggaggtcgttggtctcgctccctacgagcgccgcatcattgagttgctgcgcaacgcccaggataagcgtgcccgcaagctcgctaagaagcgcgtacgtctactctcaatccttttcccgcttttgtatggtcggctctgttgtacggattacattggatttgggggtcgatttggtcgaggtcttgctgtatacagaatggtactgtatgggccatgcatgtcaatcatgcagaggaagagtcatctcaacctctgcttggacaagcccgtgcaataactgttctgtttatagcgactaagattcatgcccaaacctaatgattccactattatcagagcctgtcgatccattgagtcgacacttttgctaacttcgtgtctagctcggtactttcggccgcggcaaggccaaggttgagtccatgcagaaggttattgctgagtctcgccgcaccgctgctcactaaatttccggacccgttcctgtttttctttcgttttaacgactcgacgcaaaaaaagcgtgattctcggatcggaaagggggcgtgcatgaaggggaaggcaactatgggattccttctctgtcgtatggagtgaaaccataatgaaaacaattattcaaccattttacgtgtgatatttgcaattgagccactttctaaatggaggtttacaacgtagatggagaagcgtatacctttggctcaagccgagtgaggtttgattccatgtaaatatggatgcagaggcgacaacatttcactacacatacaccattcatttggtgttaagcctagattttcattgaggttatctataaatgaagtatgaaaggcatgtgattctcaagtctatacgcacatctaagacgttaatgcgtctcgaagggatgcgccacatagttaagtcgtgaatcatcaagagcagcacatgtcgctcccctgaaccaaatacatttcattatcccctttcatttcttacccggtagcttcagccacttaggcatagcaccactcttccgtgccccgccggacttaccaccgccctgagcgctactcggacccggctgtgagggagcaggcacatcttcttccttgatttcaggcggatgctccaccttgagctgttgagcttgactccgaagctcggggcgtagggtctccgctcggcgttcatgaacgaacgaggctgcgttatcagcccaagaaaagttgacgagcacacggccagccagccctagatctttaatcagatgcttcttgtctgatggaggtatggcgtttgtatgcttggatcgggataccccgtggacagtgagaatgaagttctcactggcgaacgatggagcaagacaccctcgtgcgaattcatacaacgactgccctgtgtccgaggtcccaaatttggcgaccacttgactctgatctgggaaacggagcttcacatcgacctcgtgaattgctgctcgtcttgccgcttctgcctctgccttggcagcgatctcggcgtccgttggcaagcgttttgggcgagaggactcgttgagtaaccgctggtgcagttttgcgtgctcgatagagggtatgtaatcactctcattgtggtctaattttgccgaggaaggagtgtcttctgagggaggagagaagacagtaattgctcgaccagaatcggccgtggaagtggccggttcggaggtagatgggggaggggcgacttcgtctgatgcgacggtgacactggagggctcgggttgcgatgaactggagagctctcgaacaggctcattgcttgtactgtcagcgggagctgctgtgggcgctgtgttcttatcctgtgccggaggagcctcatcctctgatgacttgaagaactcgccaatcttcaccatggcttcttcgataggctcttcggtccgtcggaaactgagccgtataagaacattcccactattgaaacctagctgggctagggttttttgtagatctgtgaagctcgatacttcacgttccaaaatctgaaggacggggatctcatagtacagtcgtccggcgacatctccactatcggcagagggcgctgcccgtgaagtgaggttccgtactgggccactccctgcaactcccgcctcgaacttgcgtagtaccatccagagtgtagtcgtactgggaaatttatcaagtatgcggccattcggggcaccacgagcctcagattcgggcagttgcagggcgacggttacgactgacggggagcgggagatttgaacaagttcaagttttgccccagagatgagaccagacagacggtaggaaagagaaaggtctaattgcttgcgattgtgtctgttgcgtagagaagaccgggttagtgttgtcatcggagacaaggaacaccaactcactttaatgagtattgactagcattatatccaagcttcgagcatgcttcctgtaggatatcggtcaagtgtttggtgggagtagtcttgattgttgcccgcctggctgtcgcatcgattaccacaacgtgggcactcattgtgtatagaggaacactagctctggcaataaatagggaaggttgaatatctcaatcaagagattttaaacggacagatcaagataaacaagtgtgaaactcgaatgcggggagaaagacagcgcagaaagtagtcggaaggtcgcatacgaacaggcagcggtgcgggcgtcatctgagctctcgcgtacctcagagcttccccgtcatcaactcacctccatcacctcccccaacccgcccccttctcaaccactttttctcttcttttttcttgtgctttagctctggaatatcccttttatattgaattgcattgaaatcctgcaataatggtaagaaaaatgctccctttgtgcacatcgtccacgaatctctggacctcaaagctgaccgacttctcccatcacagtctaaccccttcgacatcagtatgccggaaccttgtccctcgtgaatagtcaactgaaatactaattgttttgcagatggcggtgcctgtgtcgccatggtgggcaaggactgcgtcgccatcgcctgtgaccttcgtctgggcatgcagtccctgaccatctccaacaacttccccaagatcttcaactacgccccatccacctatctcggcctgactggcctcgcaactgatgtcaacaccgtctccgatctcttccgttacaaggtcaacatgtaccggctgcgcgaggagcgcgacatcgcaccgcagaccctcgccaacctagtgagctcatcgctgtatgagaagcgcttcggtccttacttcgtcagccctgtgctggctggtatcaacccaacaacagggaagccgttcatctgtggctttgacagcattggctgtatcgatttcgccaaggacttcattgtcagcggaacagcaagtgaccagcttttcggtacttgcgagggtctgtgggagcctgatctggtatgtattattggtgtcatcgtacaacttgttgaattcgccttctaacacagtttgtcattacaggcccccgaagacctcttcgagacaatctcacaagccttgcttagcgccgtggaccgagatgctctctccggttggggtgcccaggtttacattatagagaaggacaaggttacccaacgcttattgaagggacgacaggattagatttggggaagtggttgttttgggctttccgttggtttgagggcaaatcccggcgtctacggtcttcactggatgatatgtgccgtgtacggtcatcaatgacgggatagtacaagatcaacgtgagagcggttgatacctgagctgaaggacagttttgttcttttggctccatgtttttcttactcctatcacgataataaaaggccccgttgtcatgtcacggcagtgttccaatttgcatcagaattcaacatatttaccagggaaacggaccaagtccagtcttcgagaatcagtaatcatcccgtctgttcaaaagctttgactgacctttgtctctcttcatagctgcccacctccagtagagaatcccttcgaggatataaagcgaacgagtgagaatatgaccagcacgagctgttggctacaggaaccttttgataccagacaccaacttaggcacttcctaggtcacaaaatggccactattattactccgtttcccaaactgtaggggatatagttggttgttctaattatgtccatagtcgcactccggtgttcctcggtctagaatgctgatattgtacaattttcaaggacgagagctgtatgagcttagttaatttgacgcgatgcgcacattcaaactagaaatatattcccaagagcaggctaactggacggtcaattctagcattcactacatccacgggtacatgagtgcctgacaacatgatattgcctaaataggaaccggccatgggaaataacggaaagtgcttcacattgctcatatgctatgcttggatttctcaatcattttctcaggtcccccacttcatgtcttttatgccgaacatgccttcagaaacagagcacctagagccctctatgccgagcctgcctccagaaatagagcccacaaaggcttctatatcagacctgcctctagagctcatggacgagataattcaactgctccccataaagtgtcaggtctgctttgcactcagctgcaagtctttatatgtacgctatcaaaatgttttggcacaagaggaatttgccttccctacatataactccgacgggggttggcttccatgtggggttttagctaagaattccagccgggaaacaaatttacgccgtcaacttctttgtcgacttcaaggacctagaagactttactgttgctcatgcaccaagttacacctggccaacgagtttgagtcctccgagagggaatacagcactgggataaaccgcaaatgcaagtatcccgggtttgtaaacgtctgtccctgcagtccgttggatattagagcaatggctcgaatgctggaagggtgtcaacatgaatgcatcgaatggcaccgttgctcggtcacaatcgcgcctgaagtggttgccgacgtgaggatctacatttcacaagatgagcagacatatttgcgagtccggagccaatgggagatcgcttacactaaggaatggttcgattacccaaatattgcccgttttttgggctgccctcatcgctctatcgtcccaaatccccagtctctcgtctgtggtatggccaattggacgaatgctttgcgtgcagcctttataggaagggccactggaatgagattggcaaaaaattcggaattgagataacacgaacactcgatgctcgtgagatcttaagaagtgaagtagatgctaagcattcgatgcattgctcttgagatacagtcaattaaagatatatttagaacagtcgaatccatcctttttccgcttctttccgctgtctatatacaacctaagtacctggaaaattccagaagatatttaaaaaacatctaacacgacatccaaaatacctataaaaacgctactattagttgaatggatcatatcgctctcaattaaggccacacacgcggccgacccttgtaaacatacatatagtacggctagtagatctgttctataagatcttagatgtaccgagtaccttccctatcatagataacagccggggaaatcaggtacttggtacccgatggccctctcctgatctagatcccgctgatcctgcagtgcagcctccgtgcgcctccgtgcatctccgcaggattcaagggaaaaaagacacaacacacaaagaggagatcgattgtcaaagggaaattaaagcttcagagaagcctgaaacatctctgctagaaatatcattagctaccagaatctataaagctttaatgacttcttgtttcaggccgtgtctagaccgcccctccccatcgaactaacggaaaatcccctctcccctccttctgagcgtcttctctctttaatatttcatattttagtgaatgtacgttgaagttgtctgatccatccacggtgtctattgttcatacaattgaatgctatggtccttaccaccaccctcggataaacacgagagcccgaacaacgaatcctcgaaccgacgtcactttcactgccacatggactatgcccgacatgcccgagccggatgtctctcacgctgtccaaccgtgtcccacgccattcccctcgtgcaagtcggagtgcatcaccggcgacggactaaatgccgttcatgacgatggagatgtgcaacgcgacttgggaacatggaatgatggtgtccagaccactgccattgaacaattggttgcactcaaaaagtgtctgcgggcagccgacaccgagctgttctggaaacggcttatggaggacatgacgtctataaccaaagcccagtatgggttcgttgctcggagggtgcacggaactgagcccatgccagaattaggcgggcggcgcccgtcggtttttggtgcagctttctactacaatgatggttatcagaaagttgggttgcagcgaaacaattatttcgcgggagggaaccccctattgcacatggaccacgaacggcgttgtttggtccccgagaacctcagctcgctcttatcgttcggcgatgatcaattgccgttcgccgccgatggttatttggcgattcccctcttttcggctggaaagtgcctggcgcacctcgggttgatgtggtcgaaagaaggtctccggcatagaaatctgtcctggtccttcctggagatgattctccactcgctcgaagacctgattatacaacggctggacacaggggaacaaattctagatgaactgttagattccccaacgaaaaatacctccgagttccacaacccccagactgccaccttccatgaagccgctgatttcaactcccatgatttcaactcccatgatttcaactcccatgatttcaactcccaccccctcaaaccctacgcccgaagcttatcccatgagctgaggaccccaatgcagggtgtggtaggcatgcttgatgtcatgcatgctacagtacgcgaggcgatggaggtccaacctcctatcaaatcgggagacatttttcaatcgctcaaggagggaattgaaatggttcaagatagtgcgagacgtgcggttgaagcggctgacaatgtcgttcatgcttacgagctcaacatgcaaattcccaaaaccccactccgggaggagcccgacatactaggcggtctcacagtcccacctgctatacccgagactcggccgagcatcttcatcgaagggaataacatcgctgtaaacccgtacaaacggcggcggagcctaccatcggagctgaacacccgaccagtgcgcaagcaaagactgcgtgcagtttcgtcccggcaagagctttcgccccgcagcgaagaagtcaagaatgctgttcacgaaagcgaccagatcgtacatgctaccccagctcgccagttcgaagctgtattggctaacatggccgatccacgcccgtctctcgcagtccgacgatccgcccctcacctactccttgagggaatcaatgtgaacttaagacgttctgctttgcgatttaccaaattacgagatcttctccgcttggtaatcaacgagtctcttcacgttggtggccgaccggactctgctgttagcaatgcaaccgagtttggcgaacggattgagattcggtcgcggtcctcaaacggtgaattgttcaccaaggttgtggactggtctgtagacccttcattaccggacacccttcttgccgatgaccgtgatttggccaaactaatctcgtgcgtctttctcaacgcgattaaatttaccaacaacggcaccattactgtttgcgcgactattgaccccaagaagaatgatgttcatattcttgtccgcgataccggcccgggaatccccgctgcattcctacccaatctcttcaagccattcgctcggggagatgcatcgaccacaagaagcaaagatggcctgggtctcggtctcctcgtggccaagggcctttcacgcaaaatgggcggtgacttgacctgtgtgcgttcgtcgacttccggtcctatgcgtggtacagaatttcgaattcgaatccccgtcaaccaacgtgaagctgagctccgccctgaaactcccggtgagagtgtttcgacgccatccacctctaccaccgacaaaacacgacagggcagtgccagtagttctctgtctgatacctctccctttaactccccatttatcctactccagaatcgtcagcaacagccgacaccaggcaccatcgacgaaaacatgtctcaaagcccaacactcctgcgaccgtcatcacaaacccttttgaatcgaacacatatttccggcgatgcatatgacaagaagcttggcgagaaatatccgctgcgctttctcgttgctgaagataatcgaattaaccggcgcgtactggtgagcatgctacgcaaacttggctactgcgatgtacttgaagcggccgatggcaaagaagcagtccagatcgtccaaggcattctctccgcgccaaagccccctgtcctagacattgatctcgatccagtaaacgcaatgcaaggcgtcatcaatgagcctcatcagactacaaaaaccagaccgatcgatgtgattttgatggatctttggatgcctgaaatggacggatatgaagccacctcacgaatcctgcagatggtcgagaaccatcgggaccaacatgctgcttttgagcgaccggaccccaagaaccctgattccatggaaatggatccaattcccaactccttatgtacaccaccccctcccacagttcttgctgtgagtgccgatgttagtgacgaggcattgaatcgcgcctccagagtgggaatgaaaggctatatgacgaaaccatataaactctctgacctccaacggctgattctcgaattctgcggcggtactggcaacggcgttgtctaaatcctagtataaccactaggccgcccatccgaacatgatgttgcttccttgcatttccatgcccagacattatacccattgatgcggatatttttcttttcatgtacagaccccacccccaattgctttgttctttagcccaggcgcctctcacgttagggtatgcattgactcggcgacctattcattttcaactgccatataccatccttgtcattttttggccccttttcagctaggggaaataccatgatctagttaatagacgtgtgcgaactagccagccctggagtcgactggtttttgttagggacataagcatgtgatcacatcacgcttgatcataacttctcttcttttcctcttcttctccccattgctagtttcctcgttgaatgaaatctttcttttgaccagaacgtctgcaacaatttgatccaaagccttcaacatttacttaccaaggcttattcagcacgctttttattaagcatctatggatgctcacaaggtatataaaacaagctaacatagtcgtcttatccagaacaatataagtaaccgcattgtttgcatctcggttcgccctggcaacgaccaggaacccttaggtccatactgcaccaatctgctatccggagagaagacctgtgtcagttctccgggcgatcttcagaacttaaccaccattgtggccgctatccatacgggcatcaaaccagaaccatggcttatgattcctcaccctcgtcatgatgcaccccaccgattactcgaacaccagatatcattctcatgacgaaacttcaccgccagtgcatgcaaatccaccatctgcaacgtgacaatcggataaaactcttgcaagatagactccactgcacattaatatactccttaaatccagccccggccacatccttatcacctagacctagcatctatggaagacgcgggccgcttgctccctgggacaccgaaacaacaaagggaatcttttggcgctcgcgacgcggcgcggaagaaggcagtggagggacaatacagactccatggaagccagtgtcacctcaccataagacaagcggaagtgtgttttgtttcctctgaatttgcggcctccactcgggcctagtggcggcgactcatttcctgcatgatttcgtggaaactatcttcgccgtgagtggctttgagaccatcgaagagattggtacgttgggtatctgagaaggtcatgaagtcgtcctcgctggcgttgaggagctggtcttgggtctagcctgggggtagaaggacacaattcgctcttagtgaggtggaatgaggtatattcattctgacaacagcggtcggatgtgggatttttagcgtttatgaatatattcactactacgtttagaaagacgtgtgctccaaggcaataattttcatttctctagatcaagtcgatatcaaccctaatgctttcttcttgcattttctggggagccagcatatgtcatgagttgaaaagacttctggaatataggcctatacatccgtcttttatatgaacctattgtcatattgacataggcagctctactcgcaaagtgtgaaatcgtccaatcctgaatcaggaacagccacgtgagggaggcagaggtcgacattctctcctttaaggtgcttgaagacccgagagtactcggtctatgaagaaattagcaacttccctttccacatggtcctttagggcatccgggagcacaaacctcaatgatgtccacaaactcatcatatacgtgatccgccttcatcttctgacgaacgagatcggtcactccgcccaaaattgcgactaccgtagtgaccttgctgtcccaagtgagaagtgcggaaacccccgttccatcaacacgagtggattcagtgctgccatagatatctggagagttatttcgattagcatcataccaatcaaaccgtcttgatatctaaaaggtgtcactgactctgcattttcttggcaataaccatgttcctccaccaggcgagtccgacagacttgtcaaccaaaattgtcgggaatacactgtacggcgtaatgacgtctagctcctggacagtttggtttgatatggaggggataccagcgtttgagatatagccggttacgtcgccgatggagggatcggtgatgttgttaactgaggcgaacatgccgggcaacttcgtggcgactgagttgcaggtccggactcgctcagcgttcttaaataggcgactaaatgggaaatcgttagtacatgaaagcctatctctgtcttatgcttgaagtctcaccggacaatatcgatgtcatagtagggcatctccatcactttccaggtttcgtggctggagaaccagaatcctgtcttagaattagccactgtcttctcgtctttcctttcatatccacaaacctttttggacagtgataggcccgaaaccgcccattttgtagtccacgctcaccagctggggccttttgatttcccatagcgcctgcttatcggcctttgacagaccaccgaagaattgtagccagaatgtgaaaatctcgccttcgaaagggtcgtccagtaaatctttagtctcgcatagatacgactgatccgggtgattgacagggagggattggtctttaatgtcaataacggtacagacccggccattgcctttgtaaaagatctgattaacagacaggagattagcgactaatccaaatctaacggggaatcatgagttacataccttagcagcagtagttttagtgtagtccatccaaacctgccatttctgtgcgagttcccgatagcttttattgcctgtattctcaagagcctggatgaaaccatatacagcccatataagttcactatacagatacttattgttagcctagaaaccagaacgagggaaaagaatatacatacccattatctagagaaggcacgcggttgacccaggctgtcactggagttagatcttgagcatccgctgtgacccagggcaagaagccaccgaatcctgggtaagtctcattgaatttgagatacgcctgcaactttttctgcataatagaagccgcgattttaggagcctctgctgtattctcaggcgagaggaaccgagcagcctccggagagccagcaacagcttgggcgtacagcatgatttgaagggactattggaatatgagttgagggctttcaaacagtaggaacatgagcacaaacctctttgctggcagcactgaacgtgtgcttggttgttgcctcgccggtcacccaatcgatgttagtgccatcgtaggagataccattgttgctattatatgagatgttgttctgatgaaacttgccctcccaatacagcatatcattgatgaaggcagtaggatctcgaaggacttgcttttgggaatattgatgcgcaaaacgacatgacggctccttggtatgtccggatatcgatggtagagcattgaccaatgttgtccatgttagaacatggccgaatttctcgtggagacgcatgtcaggagctcaaagtaaagagttgaataccgaattagaatgactagccatcgaaacggacatctcgactcatataaatactgtatgcttctgacttgaggcggaaatcgagtatttgccgaatttccatgtccacgaattatatcacatcacgagtctctggggtccccgcattccaagaagcttttcccctgagaaagccttgaatctgataatgggctgagggtgcacgccaccatggtagacgttttcccgtttgtttagctcgtgactatgcgaatctatttccgctataggatgagatcttcaaccgggattcttattggaggtcaattggccgaaggagacggagaatcggggaattatagattgtgtggggaatcgcagaatcttccccagacgccgatcatttactcgattcagacaataggtaggtacggagtaagcgaagtatgtttttatattttgtaattgtaccattaaatctagttagttaatatacattcatttgactcataaaactagctttcataacaaccgtcgtaaagtgtccgacgctttcgagtctaagcgggtcagtatatcaagaagcaccgatagatcgttacgggctcgagccgacagaggggacgcttcatgctgatcgataatctcgagcagacaagctcctatgagcctgatcttttctacctatatggccatcagaacttgctcatttgacaccaggacagcaaaagaaaggcgacttacacatggttcgccattgatctgcaatgcccagaaaggagcatcgcgaatgactcggagaagatcgcgtgcaatgtcagtcttccgtagtagtagcatttcatttggcgcagaaggatagtaattgaactcttcaaatttctgtgtgattaccatctttagacagtgcaacgagacgtaaacgttggctgcttgaatgatatgtagccttgtgagcctagacaggcgttgattgtctttattggcgtttgacatgagctggtcatattgtaaaaaggggggtaagtcatcgagagacgtcacaaacagcacgtaaagatggtcaagtctgtgactttcttctgccgtgggaggttgacgagggagtaaattcccatttttatgactatccaacaatcgcatctctaaaagcaaatcggatgcactttgccaaagccgaatgtttgcattgaatcctgcaatgaaactattttgagtactctcggcatctggaacaccactaccaggtgtcaggattgtttcatcttcaatgccggtcggatagccgatggtgatgccagagttgaatgagtatttgtgtattgtgatcggacggttgttcagaatggctgccgatttatcgccgatataggcaatccagaacgcccgtcgccgaaactccacttcgagagaagtgagcccctgcagtgaatcttcttcgtgcatctgcatcacttgggctaatcgggtggcttccccaaagatgtgccacgacagtcgtggctttccggcagcatgcatgcagttggagtggaagtatcgaatggcaacggagttggcatttgggtattcaagatcggcttccaaatatgtggccaggcaatttctggaggcttggagaaatatgtctgcgatcctttctccctcaggaaatatatccttcggaaggagaaaagccgtttccgcgcagacagcagtgatcaaagtgaaagaaagatcgggccacagctctggatatttgagactattcactccatatatgaggccatcagctctcgaattccttccttgggtcacgaagaaccctaacccatctcgtagactgggttcatgaacaagtggagtcaagggatatagatattcaaagaataactcgaagcaatgattgatagtccgctctaagttcgctgatgtgctctgcacgacaatcacccgttccaaagcatgccatcgctgcaacgccgaggtaattcttgtagaggcgacatcggaaatagacgattgggctgtatgcacagtatcaggggaaagagccggatcaagtatcgggatattggcgtcccatacatctagcggaactgcaaccggggcggtcgaaccgagattttgagttatagagtcatcttccgatacctgcaacgctggtgccaggggactatgcggaacatttggataagccacatcatgcgacctttgtcgcttggatttaggcccacgtctggcgatcggcacgtcaaatgtgcattgcatccgagccaagcggcagttggtgcatattgacgattcacccgagcagtcacactattacaggttagtttagactaggtaaggcgggggtttgcttcatacctttgcttttctccgacggcaacgatcgcatgctctagttgacgagcgcgaacgagatacagggctggccatcatatttttcgtctcggcaaaattcgtcggaggttagggcagttgggaaaatgggaatcgggatgagcctcggtcaaatactccgcgaatttctccgaatgccccaggtttttcttttcttggggtatttccgcgccttgattaattaattaattaattaatatacattgattaacaggggttgaaggtgctttatattagctttgtagaattttaggtcaattgcgtaatatctaacaaaaaaaaaaatctcatctatagtatacccgtctcattgctctatttggattcggaagcgttgccacccatgcgtttatcaaacattcctttcagcaacaatgcggattgcttcggcgtcctttccagggtgttgtaatcagtgaaggtaacgccgaagcgaaccccgtatccatcggaccattctggaagaaaaattagctcaaaggtcttgaagtatgaaacaagacacgtacctaggttgtccatcaatgaccatgcgaaatatcctttgatatcagagccatcttctgtgcgtgctgttccgaccgcatcgagatgatcttcgaagtatttgattcggtaggtatcgttgacggcctcttcagctgtcatcttgtcttcaccaggacacgggcacccgttttctgtgatatagataggcttgccatatgcacgatatactcgtgttaagtgcttccgaaaaaggctcggggttgacaggagccaatgcacaccacttttctctccgatcaatacaccttgcttgttttcttgtagttcatccacatttcccaagaaatcagtctcagaggcaggctggtcgcgatgccgggcaaattgggaggtgtaatagttcattccgtagaagtctatgtcggcctccctaagcagagaaaagtccgactctgtgaacctaggaagtctctcgccgagttgctctctcatgcattcggggtagtcttgtgctaaactgtcaaaggtgttagttgtgtgcttttgctatctgaaactccgaaaaacctaccaaacggggttcgcaaaccatccgatatggaactgcatccggcgttcagcagcttggtggtcgcgctcatcctcactatcccagggctcgtagtaatcgccattcaaggagattccaatctgcccttgctgagaagctcggaattcccggttatacaaaacgacagcgcgagcgtggctcatgatcaaggctttccccacaatccatggctccgtagtagtatcgccctccgtgcactgcggatttatactgctacgcccgggcgcatttccgccagtagcgtatccctagacacgtgttagatgctatccgaaaggataaaaaagaaaggacaagggactggagaaacatacgaaaatagaagcaatccacggctcattcagtgtgatccagttcttgactcggtccccaaatctctcatagcaaatctgcgcataccgctcaaagtcaagctgtgactcctccacattcaaccaacctccgtatcgatcatgaatgccttgaggaagatcccaatgatagagagtgacccatggtgtgattcccctggcaagcaacgaatcaatgagtttgttatagaacgcgatgcctgcttcgttgactgggtcgtttcttcctcctagcggaatgattcgcgaccaggaaattgagaatcggtatgcttttgcgccgtatctcgagagaagatcgaaatcctcctcaaatcggtggtagtggtcgcaagcgatgtcgccattgtctcccttggtccttgttggctcaaggtggcagaaagtatcccagatcgattttccacgtccgtcttcattcacagctccttcgatctgatacgaggctgttgcaaatccccattcgaaatcggggggcaagggtactgacatactggcaaatggcgaacacaaagccacagaagcagtgtgaagtactttgaaaaagaagaaggtgacagagctctacccaagcagaaaattaaagctatattccttatagccggggaattgtggcgttgaagtggagagctcccattgaaggataaacggcaaaattggcatttcgccgattccccgaatctccagacttcacatttttctccacggggtaattccccgcagaaatgcggaatccacgtttctttcagcacgtgaacacctccagggttgtcggaatgcgtagagttcgttgtatccacccggctgtctcttctataagaagtgcaaagaagccttcgggctaagactccctatcattcgatcataggcaagtccacttcatttgtgtcttagtctcaattgaagtctgcaatcatggctcctactgccgctcatgccacagagaacattatctcgtccattgacgtggattctatgccgcctttctggcgacggaagaatggtattctgctatacttcctgctcacttcgtctctactagcaagtgcggctctcggcattgatggggtgagttgtagtgtttcaagactggagtgcgtttcactgacgatctatcacagtccatgacaaacggcatgcaagtcttggattcctggcaagatcgatttggacacccagaaggtgctacattgggtttctttggagcctcgaacgccattggtggtgtcatcccatttatctttctcagctggattagtgataaattcggtcgtcgcctacccactgcgctagggtctgttgtcatcattgttggtgtgcttgtcgaattctttgccacttctttgaacatgtacattggcggcaagatcgttctaggtgtgggatcttcgctcatccagatgggcgcacctgttttgatcacagagctgtcccaccccaaggaacgtgtacaagtcactactttctacaatacatccatcgttcttggctatgtgattggagcctgggcaacgtatggttgttacaggatcaccagtcagtggtcatggcggctccctactttgatccaagttgctccctcggcctaccaattctgcctcatttggttctgccccgagtctccccgttggttgattgcaaagggtcgtttcgaagaagcccgtaagatcttaatcaagttccatggtgaatgtgaccccaactcggagctggtcgcggtggaatgcgccgaaattcagcaggccatcgacaaagaagcagagaacaacatgagctggaaggacttcttctcctctcgcgccaacctcaagcgcctgttcctctgcttcgccacagccgttttcagtcagagctcaggcaacctgctcgtctcgaattacttgacccagatcttgaaagacacgggcctgaagacccagtccgaaattacacttgtgaacggaatggttactctctggcagtatttcgtcgcgatcttcgttgcactggtcatcgataaattccgccgtcgattcttctttcttaccggttccggtggtgttgttgtcactttcgtcgtgtggacaatcgctgcccagcaatatcttgagcacaactctatagtggccggtcgtgtcgtgattgcctgtatcttcttcttccaggcattctacactttcgcgtggaccaatctgattgtcacttattcgctggaagttgtgacacttcagatgcgcgctaaaacatgggcatttgtgctcctgactattcaggtggcctcgatcttcggaagctatgtcaaccctatcggcctcaagaaccttggctggaagttttacatctactactgtgtctgggtgcttgttgtcttcctcgtggtctacttcttcttcgttgagacggccggtcctacgctcgaagaactcgcttatctgtttgagggcgaggatgtcaaacgtggaattgttgacaaggtcgcggtgcaaaaggaacaagtacaatatgaagagcacgtggagaccaagtcggcgtgagataccattgatatgaatgaaccatgacatgacgatcatgcacataacaaatgaagataaaaataattacaaatcaatgatttccatcagaaattcgaagactatgttgaataaacatcaaaagagtagtcgaccgtgtatgaggcctctattcttgatgacgtgagctgtaggaataatactattagaggtacagagtagccctagagacatgcaatatgtccacaggttgaggtcgttggtatgggcaatgtcgtttcctggaagatctacgcaagacaagggaatagaagaaaagatatcattacatccattatcaagatcgacatcttaccacgctccaagcactccgcaccctttttttgctgaaacactggctttgtggcccaacgagttcacaaaggggtctcgagaattcgaaaggccttcgactagaatttaaagatctgccgttcgctaggaaaacagtataacaacacatgtaagcaccaatcatcaatattcacgtaaaccgacgtgcgtgaccacagcagaggtggaaggaagatgcaaggcataagaaacgaggtatgctgtagggaataagacaacgcggcatctaagtcaacttctgcttgatgaagaatgaccgcaggtgtgaaagctgccaggcacatgcggcggacaaaacggcgagctggataagagtccagcgcacgacacgcgagttggtggtctcagactggtcacgaaattcagactcacgttcctaggtagaaaaaacattagtatcaccactccaatcacctagagagactctggccatagattggattgggaaatccttacccgctggtacacctgctcacgacggatatcgtgcaatcggctgttcatatccttgacccgctgcacgatatccttgattttgtccttatcctcaggctcaatcttgctggtctcaccaatggcaaggtcgacggtgatcttgacggcgcccaaagagttggacaaccagccggaggaggcgtccgtttcaggtgtgaagcagattctgtgctggccgggatccgcggcggagaagtggaagcgaccagaatggctatcccgcttggatacgacgcggtggtcattgtcgaaggtctcctcgacagtgatgtgcatcttcaagttatggtcgaccgcgtagatgccgctctgggggttcaggacttcagtttcgaaacggcctatttgtgatttaacaacataggttagtttcaaattccttcgtaaagtctctagagatgcgcataccggctactagagtatccttaggcaggtcctcgaagaagcactttgtttgccggccttccatgtagaagtagagggcattagtcggcagaagaagagaaaagaacgataggagagccaaagctgacgccagccatgacgaggatgtcccagagaaaaccatgatgaggagatgggcaattggatagtcgcacggccaagtactcctctccgtgaaggtgtcaacatgggacgtggctcctcaccgcctgccgtctccggaatatctccctttccagcgggaagcctctgtcgatgtgatcttcaatttcgacattcactagtctttattgcatcaaacaaaatctactttcatcttctcgtggtcgcttattaaaatctaatcgctaaatatcgaagaatcactccttggtgtcgtgtctagatcaccacacccaccgccaatatggccgcggccgatgttcgcgacatgctggatttgcccgcagaagggcagcccagaccgcacaagaagcagaaggttgtcgaaaagcgaccaggtaggtgtattgcgctccccgaaaaataagatagattactgacaggctgttgttgaagagggtattacccgtgaattgtacgcgctactgggcgaaagggcgccgccaatcgccattaatgagaacaagtacaagggtcgtccaaaatggatgaacaagttgcgcgttcgaccatggcatgttgaagatggggctctttgtatatccgaatgcacgctgacattgaatcccatataggagcatggccccattcacgaacaatgcccgttccgacggcctggttttgaaccactggcagcgaaaacacgagtcagcccgaccacctgttcccacacctgcacccgcaccctcagagtcccaaatggaagtggatcagcccaaagaagaagagaaagaggacgtaccgaaactgccggaacaagaatatgcctttgctaagtataacgtcaaaccgcgattgccccgtcggtacacagatgacgagtacaatcgacatcttacaagtgatgactggtcgcgcgaggaaacggactatctggtggacctcgtcactgattacgacattcgatgggtgctgatcgcagatcgttatgactaccaaccacgaatggactcacagccggatgcgaatgcccttgtgcccgcaaagcaccaccggacaatggagcagatgaaagcgcgttactattacatcgctgcaacaatgctttcacttgaacatccaccctcagagatgtccgaggccgagttcgaactacacgaaaagatgctcaagtttgaccccgaccgagagcgtgaccgcaaagaactagcggcccttcagcttaaccgcacagccgacgaggtccgcgaggaggcaatgctactcgaagaattgaagcgcatcacaagcaacgagcagaacttcatcaccgaacgccgggaactctactctcgcctcgaggttcccatcagcgtcggcaataccacaatgtaccaatccagcgcgggtctttcccagctcctacagactctactccaagccgacaagagcaagaaacgccgctccatcctcggcgacggtgccatccaaagccccgctggccagactccaaccactgcgggtggcatgggccgagccgatacccccgtcacacaggccgcaaacaagaagggttccatcacatcaagggagaccaatcaaatggtacgcacgcttaccccagcagaggaagcgaggtacggcgtccagcaccatgaacgtgtctcggcaggcgtgcaattccgcagcgaccgcgcacagcgactcacgcaagccaagtccaacgtgcaaacccagaaactggccaatgctctatccgagctcgagattccggtccgcctgtttatgcccaccgaacgcgtatgcaaggatttcgagaaactcattcagtctgtcaacatgctcctcgacgctcgcaaggtgtccgaaaaggtcgaaagtgagatccgtgtactcgaagcctcgaagatggagcgcgaacgcaaattacgagaagctgctggtatctcggggccaagtgctgactccgggcatccccatgtgaaaaaggagaatgaagacggcgacaccggcgttttgggtcactctgctgcccaaggtgctcaacaagggggtggtaatcacaagcggtctgctagtgtgctcagtgccgtaagcgacaagagcaacaagcggcagcggagatagatcatttgcttccctactggtgataaaattacacccttattctgagcgtgtgagaactgtaagatgtattagggatcaattacccatattctgtacgattaatgacacccaatttgggaaacatactcataattgacccaaactccatccgcacgagtaacaataacagcagaactcactcagagtccttgataacagtatttttatgcttatccaaccataacactctcgttactcctgtgatgatcgttgccatgcatcttggtcactctgcctccaccactagacttgttcggctcgcccaccggcttccatagaaagccccgggcatcccaatgcactcctgatacgcactcgcgagctcctctgccatatcgcttctggtagagtttgcccgtcccaggccactcgatggatggtcctggtactgcactggcgatttatcggataattcttttggagggagattcgagcgtctcttgctttccctgttcctggaaaacttcagtacccaacggccactacgggagcgggaaggttctccatttaatctgtctgcactcctgtcattcgacggatcgaagtacacagagggctggtggtttgtttgatccatcgagaagtggcgttcactaagtggtgaagcatctggggaccggacacagacatcacttccatgggttgaattgtcgtacttctctggttgtggttgttggcgtgtggaccggctgattttcgcccatcgacttaaaaaggtttcgtccacgtcttcgacataaaagctgcttccggaatttggagtctttgcagaagttggtgtcttctcagaagttggcgactcaatgtgttgcgcgcgaatcgagtttacacggccaacagccattccttcactagccaagtccactgccagcggtgcgtgtctattacctcgaaccgaatggctcttcattttggcccacatcgatggtgtcaaaactggttctgccttgacattagtaggactttgtttcacaggagactgttggctgtcaggcctcagcccgggagtgtctctgtggtcctcagcattgtccaccaagctatacccatagcccatccgccggccctcggtcatccagccgggactaactttgcgatgtggtccggcgccgttggcgccattggaaatgccatgactctggggtgatccccagtttggcgtatcaagttgctcaacaaacttgcttttcagagcctcggtacctggttccagttcatcttcgaccgagcaaatctcagctgccatttgtgtatgaatattgggcaagctatcaattgcatttgcagcatgaactcttagtgattgaacggcagatgctccccgcgaagggtcactgctttggcgcgaataaaaagaggacgcatctcgttgatgagacatagcctggttgtgggactcgggacccatgattgccgttccagacctctcatgaggctgaaagttctcctgtgataccatttgtagcccatatcgattcgcacgtggaagttccgacatggatgcattagtcgatggcggctcggaccctatgcttgttcccgcgagtctgtgcgaaaggtctagatcacccagatgtggtactcgggcctcggggtgtgtcctgggagaactagttggttgtcgtgttttgcgaaccataatgcccggatcttccctggctagcgatgcggaagatgccgcgcgataatcattagggtttgatcccatgtaatgagcccagtcagccacaagattctgaaggttctcaccgctgctgctgcccataaagccttctcgagatcggagacgagccaattcttcttgactggcatgaaggcttggaagagattttgtgaatgtgctttgctcccccgatcgctcattcttgaatgaaggcacggactggctccctgtgtgttcggttgcagaggtggggtgagctgagcgccctcgcaaagtttctgggggcgtgggtatataatgcatgccaaagggagttcccggggtatcggattgatcatggcctttggcacccgtccacatctccaagtcatttcgctcacgactgcgctcgattaggtcctgcaaccccattctgcgatatgccgggcttctgggcgacgctctcatatggggggcatgccgaggactcccaatgcactgggcatcactgtcgtaccctcgcgcgctcatcagactgcttcccatgtcgctgaccattgaaagccctgtagtccctttaggtccatttggctttggcttgagcgagaagggaaagatgggacggttttctccagactgtctggattctctcgagaatcgatgacggagacgcgaaagacttgtggatctccgcctatgactttgcatagaccttgcagttgatcctagtgcaggggctgtggtctctcaagttagccaaatataatatgagatcaagtaatgggctgagccttgcctggggctcgctccctgggaccatccacattctccatttgaccatcttggtatgattgtgcgaagccaatcggagaatcaacacgatgtccccttcggagacgaggacaagcaaggaaaaacatttggacatgggatgtttacaagatgaacttctacgcgctcataaatctctccttgttagctttttggggaaggcactatcgtcagcagatgagccttccattttaagacatcacggggtcgcacttgctgtttgttgatgtcttgggtccatggctcagtctaactcaatgtggttttggctcacaaccttgcgtataaaacccatgttgacatctagtacttacatgatcttctcttcgttcaccatatggagtggatattgttgttattcattacgtactagtgccagaagtgggaccgtacccataagcttgtttttagttttaatatgggcaacagtaggactgtggaatatgtatgtcctcaatgaagatgaagaatgtataaaatctcttctttctcttattctcactggttagcgggcctatcccgtaaaaacagtttcactttctattccaccgaactgtcgaactcggtgattttgccatggacctcgtaagatcaaaaagcctctgctgaggatggaaataatcaccgaacaatagttgcttataccaacagtggaacgtggggagctgctggcactgaattgtgtactttgtaccaaaagtaagggagtttggccatatagtgcatggcccaatcaatgcaatctgctaaccgcccaataacaccgtagatcatttttgcaatagattaatagggacatgaacctccaatccgcctagttatgtatccatcgactcgctgaatcacatagtggggttgtgtaaatcagggaaaatcccgcgggctcagccgcaagacgacaattcgatttctttggactttcccggtttctttctttgatcggatgtcatatatcccacatgttaccccacctcgtgtcacctttgaggctctttatcatttcgatgtcaaccaacttgaagaactcgcgctccttgcgcttaatcgtcgcccttgcaattccctttacactcatttgttatctctactcgtggagacaatcacccatattcatctcccgtcccgccataccgcagtcttccgagacaactagaacctgcacagcaatatcagtgcctctaaaggaaccttcaaacaacaataatcttactactcccgctgcacgcatttatacactgccagacaaggtctggcattctgccaagtttgatgatatatcagaaacccaacgcggatggaccggcagctggaccaggaaaaatccctctatccgccaagaattgttgaccgatcgatccgccgaagcattcgtgcgcgctcattattttgaaacacgaccggatatcgtggaggtttatgaagcccttccaatcccgattctacgtgcggatctttttcgttacttggttgttctcgccgaaggcggcatttggggcgatttagacacctcctgcgagaaagaggttgccgagtgggtacccgtagaataccgaaatgagaatatcgatatgattgtcggattggagttcgactttgaatggcgaggaccggggacggaagttgcttcccagttctgcaattgggtatttgtcggacagaagaactcgcgcaatctgaaagtaattgttgacactgtcatcaataaattggagggcattgctcaagaaaacgccgtgagaatcgaagggattaccttcgaaatgctttcagacgtggtcgacgtgacgggacctaagattatgacgattgcgatcctggagagcctcggacaattgctcggtaggaccgtcgacgatcgcgattatgcacaaatcaagcagcccaagctggttggtgatgttttgatcatgcccggagtctctttcgctgctcttcaaaacgggaacccgacggatcaaggtgacgctctcgtgacgcatcattacgaaggctcgtggaagaaggaagatgcagatgcaaaggagaggaaaaagcagaagcaaggaaaagaacggtagcaagaagggtcatcgtcaccaccactgcctgctacagcctgattagaattatgataataagcgaagagcagcgggttgctttgattttgctttccttgtgtgttgttataactttttcattccccgggatgtaatttttcgctcgaatcctcaagagagagacaggattggagattcaaaggaacatactatgtaattaccatgtggagtatggtctattttcggtttatgctatttaaaatagtatatcaatcaaatgtcgtgttttcccgttctttaatccccgatcaacggaaattcaaacagggacaagattcggggtttgagctgcctattccaacccaaaaagaaatagaagcgcctgtgcacgaactaagtacataatgaaagcgaataacacgagaaacctatcagagtatcaagagaaacaggtgcaaatttactgccaatggtaagagacaaattgaattaaggtactccgtacaaaagaagcaaaatcccgacgacgtagcacgtgatgaagctctaccctagctggattgataaaaatagcttgccaagtcggatcttgccgatctcgggagcagatcactttgctgactggtggagctgtatgtatacattactccacttgagaatcgccaaagcttgactctgccaagagaatatcgagacaaacgcaagaaacgcaacgcatctacctgggtataaaccagactagccttgaaacgttgtccactgcaagtacccaaaggagacactccgggcgctacgaaagcagattaaggtacccgggtcttattatatggttgtacacgagggttcaatacggagtacagtatggacaaagtcaacgagaggattgattccacaattttcaaagcagccgtgccgcgatatgagatcttacgctaaggtgaagggatacaggaagtccttagccaaaggctacgcaactaccgacctaccagattttcgcaacgagttgtctgactatctcaactgtgaagatcagtctactatcgaattatgtggctacagcatgtacgagtggcgtagagacagcacgttcgaggtctttgtctctgttgacggagaatctgtcagcactcagtcagacttcagctattactaaggcaattcagactgcgaccccaagcgggatcaacagtgacggttacacccccacaaactccatgcctgtcctgccgtcgataacatatggttggcaaattccagtcccttaccaccttatccgaacaaagaactgtattcttgcatggtggacagtctttcgtgtatagttagtcaatattgcacgcagatcaatacgtagacttatttaggacagtatgagggagcgataagagcgcctgcgatggaatttccaagaatgcaaccacggggcagtacggtgcctactgtgtctgcgccaacaaggaacaaatatcttatgtattcgaacgctactataaaggctagaagaaggatcagtcggcgtgctatttcaagggagcggcgtcaatctagtcttgtagggatccttccggaagttgcagggcacttctcagccaagccgatctagctggaccaaatcaggtcgcaggtccagagggacgggtgccagtacgatgcggccagttactatgttactctgtttttgggtgaccatccacctcttctgttcggtcatggccactagccacatctatagattagccaggtaccgccgtcgttagttgacgatcgcactattgatggagttatctattgacagcagatattaccagagccccattcgtgtgcaagtccaataattgaaacattattggatccaaatcactccagatagctaggtgcagaagtagtggttattttctgagagcatagagtgacagccgcgataatcaacattgtcggacaatccggtgacctgattagtaatcaggtgtccccgccccacgtggggcctaagaccgttacaattttttttacaaaaaattacagatcttcctcacgcccacatcccatcgcactcccctctttgaactatttattccgtttcagacgtcaagtcaaataccgcaaaaatgggcaacgtaaggaggaatccccaagccatacagacgacgccagaccatctgagctctttgtttgggcttatcaacgcagtgaactaacaatactcgatagggagccaaggcaagcatgaagcgcgagcgcaacgcgaaggaccagaagaccgccaagtcgcagaccaagagcgtacgtcaagttatctccaacccccatattgtctctccggccgctgacccacatcattgtctagaacgagaaagccatgaacatccagtgccaggtctgcagacagactttcctccagaccaccaaggctcctgcgtatgtgattccaaaccccagtcctttgcgaatgccttccggtcttgcccgtgtatatggttccttgctaacatgcgtattcgcgcggctatagcctcctcgagcacgcctccaacaagcacagcaagggtctccccgattgcttccccggtatcagcgcataggaaatcaccccggtggaaccgaaccaatcttctttacgatatcacgggttagcatggctttaggagttttgatgggaagcgaacatatctagcaactggagttgagagtggacactctacgtaggcaactatgtaggtgtaggtggtgagatcataatggggtgtacatgcggtggtgatgtgaaaacccttatgattatagatgcagtcgacgatacatgatctttctctccctccatgctcactaattttcctacagtactaacagatggtggtgaaacttacacttacggggattagatatagtcgtaggcctgcttggcgaagaaaggtcgtagggtgatatcgttttggtatactatactacacattctacaatgaatttatattgattgaaattatcaattatcaaaggtctaaactgacaagtatctaccagacccagacccaacacaggattatgattagattgtgatatcaacttagcaacattattgagaactctacgagtatcgtactatcaagccatattcacatgaaacataccaagtgacatggtgcactgatgatggtgtgtgcctctctcagatcactctcagatcagctctaccatggaccttgccatttcgagtttctcagttggaacaatttccatttcgaccagcttgctgatgatacgtacagcccacccttggcagttctccgtgacagattgcctgttggccgctcgaggggggggctcttgctctgtttcaccaccatttcctgttctttgtcacaggggccagatgatagatgttcaaaaaggcgacggagtggacaatattaatagggtcatccgaaggtagatatgtcatcaattctgcatctcccgtgacctgatacaccatgccaggttcgttctcagtggcgacaaagagtgaccaatgcagaggttccccttcaccttgttcctcatgaaccagagagattgttttggagggtgggggagagtggaggaggtgtctgagacctcttggaattaattttttgctcgatccattcatccctaagaccaatgatgcgtatgggagagtctgaagttggatagccactcatttctaggtgacataagcatcaggggttttcgtacaatgagctaaacaatttcagtattcactaacgaacgagcgtctcttgtcgcaatggtccagggtagagatatttgaacattgtattatctaaccgtaaaaccaccatcaactctaatatccgcaccgttgatcatgccgctggaatcctaatgtaaaagtcagaaccagagatatagcccactaaggaggaaaaatacctgacaaagaaacaacacagaatcagcaacctcctctggaagcacaaacttgcccgtcggtatattctccaagaaggcctctttaacattcggctccccccaagccttcctcccaagatccgtccacgccacagtcggagacacagtgttagccgtgataccccgaccaccccactcagaggccatactgcgcgtcagacccaggagcccagctttcgaagcacaatacgcgccatgccgatgcagcgcgacatgtgccgcctgtgaggaaatgctgacaatcctgcccggtggcgggggattaggcgatgattcggcggccttggatgcggcaaaatagagtcgagcaaatgcctgagagcagagcatcggaccgaagaggttagtggtgagatgtttcagcgtttcttccggcggtgttatctccatgtcgctaagagatacgtatccagctgtattgattaggaaacttgggaatgctctattagatggagagcccgaggttgggtcgattatttgtttctgtaaggagttgaaggccacctgcacagagtctggtgaggtgatgtcgcattcataggtgtggatgttatctaggtcgccgctcgcgccgtaccgggattcgagaagctcgtcgcggcgtgcagcttcgaaaggtgcatagagaacggcgagatgggcaccttgttgtctcagcttttgccctatgcttgatccaaggccgcctgtggagaagttaggtttcgttgagtctggctttgtgtctcgtgtccctacctaggccgccaggtatgatggctaatctgcgggcaaatgccattttgtacgattatatttgaatagttgcaaaatgccaacaggaactggcacctgacacggtgtatgaacttcaaaccgggcattctccgctgaggggaagttgaacgctttcggaaatgatcgtccagtcttcacttgatgtcactttgtgttgaaaggctgaaagatacagagtagttagagaagcttttgttatttacgttgataaatacaagttaatgagggataattggactagaagctcatcgtttcggactaacaaaccgtcaggttcaagtcccactaacaaagatcatatttacttctctttcttctcccctgcatgaatatcaacatcatccaagacagcctggttctctttcgctgccgcaagtcgaatcctctttagcttcctcgtatcaacatccacccgccaagtaaaagcccaagtaataaggttcataatgatcgccatgccaacgaatcccatcgcaatcccaaaggaggtcgcatatcgtggtgcgaaccgagaattaaacagctgagagcccacagcccctccaatctggccgtagctattcgcaaatgcgattgcaaaagcagatcccgttgcgccctcggtggtctggactcgccagggccacatcattgtatacctggtttgtcttagcatgaagtattgatataatatagaatgttaccagtcggactcaccatgcagtcgagaagcctcctgctattatcgtcgcggcatatacaccaccgttgtttgggaaggcatatagcacgccataacacgccagaatgacaatcatgaatccaagcgggatagctggctgaggaatacgcccggtatctgcgaagataccgaatacgattgtcaatattactgcgaagaccgcagatgggatgtttagtagctgggtttcacccatagagctttgacatttgttagcaaataccccgagcgcttaaagctggggcaactcacgtaaatccaagattggcaatgacggtgggttggtagaatgtgagtcccgtcgtcccgatagtaaagaaggcccaacagaagaggaaaagccagattcgcttgttcttcaacgtcgtgataagttcgcgcagattaaagttagactccgccgctcgaggggaattgctcggtaggcgggcttgtgtgaaggccttttctttttcggataaccaagatgcagttgaagggactgtggagtggttagttatgtctggcactgaaggttggatgacctacaatcgggtaggaagaaataagtaaatattcccagtaagactgtgaagatcccttcggtcaaaataagccttagaagcatcattagcatatgatcaatctgtttgagaagctattgaaataccatttccatcctgatagaccaccagcaacgacaccattgaaagcaaatgcaagaacaccactgatcactgtgctaaagtttcctaggagagtcacaagaactatccttggagcaacctcatcgggtctataccaatagcacagctgcaagagcattcctggccacagaccagcctcgaatagtccgagaaagaaccggactgcatatagaccctgtctgtttgacacagcggcatgacagcagagaacgataccccaagatatctgtaattgtcagtgccaaaccaatcagaggtgtaataattcaacgtaccataatcctagcttgccaaatcgaaggtctcacaccttttagcaaaaggttggacggggcttctgcaatgatgtaagggacctccagggtattagtacaacttcaggaatgacgcttttgattcgagatctctcacataatacatagtcgtgaccagattatactggtctgaggtcattttcaattcagtcaggatgttatgtggtgtgcctttatccataatccgggcgtatgagacctaaaacattctggtcagtgatctcccaccaccgtactccgtagatgatcttacgttggtaaaatccacacttttcaacatatacataacggccaacagtggaatcagatgccaatcaatgcgtcgtaaaagcttcttttcttccgcgctactgagcgtcgcacgcgctcgcatcagggtggcatcatagccgggaatgagctcttcttcaaaagactctggagtgtgttctccattgcggttgacatagtgtatatttcctttcgccggtatcggtatttcgtccgcggagacatccccaatttggcccttctctgctatctcagaagacatagtgatcaccaatcagtgtcttttgtagttggcgcacggaggcaaggtactgctggagcaattgcaacgatccagaaagggtatccagaccattaaatggactctattagtatcatatttgctctactccgcaatctcgagcaccaaaagttggttatctcctgcgtgaattgcgcaagatgagcaaagaccactcggcatggcgtgcaaggattagttacctagcgtcttatactagttaagctggggaatctttgccgatagcatagatataatccctgccgtgcgctaaggacccctcagattggaaagccgaatgtgagctatagtccattgttggtctagacagttgaaacaatctgtgaagatgatctcccaggagccaacacctagagttgttccctagtatgtagcgcactttcgtcaatcaaccttgacttttgtcttcctgatatcaatgtcatagatttgatttatatagcacctattagaatacaaacaaataatgctttgaaatcgacagagcacgcgataataagtcatgcttggcaaattcatggctttaaactagtaaagtgaatttgccgagcaaagataatgcatctcgctacattcagtaaaaaagtacgaagtaacgaaaagaagcaaatacttcagggctacgagtatacgccattgcggggagagaattcctaatcggcccctctcacagcacttcatcttttcctgagagtcaatcacattcctctccagtccctaatctttatcagacttcaatgggccgagaaacatgaagaattacctgtacttttacgccgcatctctagcaagagtagcgttggcatcggaatcccaacaacccttgattggagaagtgatcgacaagaacctgcaatctccaactgtgaatttaaaaagaattatcgacgaatctcctctcttatcattccacagagacattgtgcaaatcccatcaatcagcgaagatgagaaaagcgttgggaatttcctcttggacttcctccgctcccacaacctgaccgtcgagaaacaaattatccctccggggagtgccactgagcaagaaagatttaatctttacgcctacaccgggagagacaggttccccgagctgctgctgaccagccacatcgataccgtcccacccttcattccttactctctgcatccaccagcctcagacaaatcaggggatctgacattcaatcgatcagacctgatcatcgctgggcgcggcacggtggatgccaaagctagcgtcgcagccatactattcgctgcactggaaacactagatgccaacccggatgcctcaatcgggctgttattcgacgtcggcgaggagaaaagcggcgttggaatgaaacatttctcaaactccggtctcaacccagcaccgcctaaattccacacagtcatattcggagagccgacagagctcaagctggtcgcgggccataaaggcactctcgggctcaaggtcgtcgctgaaggaaaagccgcgcattcggggtacccgtggctcgggaaaagcgcggtctcctcgattcttcctgttttgtcttacctcgataccctgcaagatgtcctgcctgagaaaggtggacttcttcgtagtgagaagtttggtcagtcgaccttgaacattggggtcgtgcgcgctggtttggccggtaatgtcgttccggcatatgccgaggcaacgatttctgtccgtcttgccgctggaaatccggatgacacgcgagagattgtgcggaaggcggtcgaatatgtgactggtggtgatgggagcgtctatcttgactttggggacgtcgagaacggcgctccgccccaatatcttgattttgacgtcgatgggtttgatgtgattactgtgaactacgggactgatattccttccttgaagatcgatactcaaggaggtccaaaagtgaagcggtatctctacggaccgggtagtattcatgttgcccatggcgatgacgaggcaataaccgtgggagagcttgaagaagcggtgcaaggatacaaaaggttgatctcggctgcgctggttgcccactagatataggccttttttggcttgagagatagatgaatgcagcatgctacagctatgatactctacgctctcatatctacgagtctacaagcggtttgctggtgggatcgcaagacatcgaacccgaaatcgaggaagcccggtagccacgacggccatcgactggactgtaacactcgagctccctgcaactgaggcccatgcagtggggcccaatccccgctggtgctggcaggacatagaagtgagtgatgaaagcaagttcgtcacaaacaccacttcacatatgcctcgggtgcaacgagaattcagcccagcccaacataggaatggccgggcaccgagcccatcagtagcaaaccgcggatctacacccgagacgggcagtcagcagcatctgcctggagataaaatcttcaaggcacgacaccaaagaggaaaaaaagagggatgaagcatgcatgtcctttcgctggtattgtccagatcaagttttaacggtaatatctcagatcgaggctcgcgcttttggaagaccaaaaacgcaagacctcgaacacccgtcatgcgtgctatagaaaacacacttaccaaaagcatccttatagagatgccagttcaccaccttttttgttctcatcctgtagtcccgatgactatcagcgaaagggaagctgccgtagaactcctaattcaaacgcccgtcgtatcggccgagatattcgtcttctcctcacgttcaatggagtgctctgtctcggtatctgtgtcaacaactttgatatgcccaaaccaattatcattggacttgcgccaccactcggcgatcgcgatgatagtgacaccgcccataatcacaatcgcgtagttgaacaaggtcgaatcctggtcaattgctttgtccgagtaagccggggcgcagagaacagcgaaagcaaatccgttccacatgaatgtgacaacagcagcgataatgctaaaccaacccaaatcccaaaagcctggacggaacgatttacgcgtgataaacgctcggcccattccaaccaatccgtatgctgctagggaacccgcagctgaagtggagaccaagctggagaaggccacttgcgacgggagctgggtgcatagcagaagcgcggcaataactgaaatgaagatcacagagttgtgaggctgcttcgacttcgacacacgcgatagcacgtcgctgaatgggaagacaccatcgcgtgccacggcgaatacaagtcgcgatacagcaaccaaagaaatcgaagtattgagaattgctccgatcatcgcgacaatggtcatcacaacgtgcgcatggggaccgagcgccatcgcgtacatgttgatgaacggctgaggtgcggtagtgtcatagaatgtgtcgatcggaggcatgcagaagagaaacaagatgatgatcgggaagccgcacagcgcagacgcaacggttgcccagaagatacccttcgcggcggctttcttagcggacacggtctcttcggcgacatgacccgaagcatcctgtcccacgagacaactggcgaccaagtaccaggacagaacccagttcaacccaggactggtatccccgccattgtatgtagacgtaaacacgtattcggctgactggaagccgtacgtcttagagacgccaatgggaagccagatgaagttgagcagcatatcgatgataatgatcgtcacacccgttctgaacacccacgagtacatgcgcgggggcaagaaatttagcgaggtagccatggccaggaaaataagcgagatagcccatgccacggcacgcgctcggacatcggccgtgtcgtatgggaagctcgtcttcggattgaacacgacaacctcggaaatcaggtaattggcgacaccgaacgaatcactcgcgaggaaggcagtccacgcaaccaatgtccatgcggcaacgaggaaggagatgaagcggccgacttgaccgcctccccaggatcgaaaagcccagtagtaaattgaccccgcggctggatagcttgaacaagcttcagcgagacaggcggccgtgacgacggacagaatactaccggagacccaggagctccacctaaggaagttgttagtgatgtgatcaatgcgaaaaagcgcggggaacagcgcggaaagtagaacatacatggcagccggcccgcctccactgagggcgatatagaaaagcacacgaattcctccaacgcaattcaaggctgagaaggagcaggcgaaattgtcgaacgagccccagcctcgagccaagacagagcgatagccaagctttaggaggtcgcgatcatcttcattggtcacggaaactccatcggagttctgggcttgatgttcactgttctggacatcttgcggggagttgggtacatcgagggcaacaatgtcagggaaggtcatgatggctgctcttgtttttttgtcttttgagaggcttggcacttgacaatcgctttcttttttttcccaaagaaaaaagttctaattcaattaactttttccgatccctatatcacgtgggccgatcaatggaccccgacaccggggtttgttcaagggtcttctgagccattattgatttgaagatggaatattaaagcatcatgaggaattgactagaaatgctacttcataggtagtgaagctgccaattgatagtatgttgttaactatcagcttggctgttgtccgggtgaaggggcggggtcaattattgacagcgtgtcacgcatagtggttgtaccgtactccctataagtatactttggttgaccgctcattaatccatacaataaatagcatacatacaagacccttgctgaaaaagaaaggaaagcacttcattggcaattattaatagtcgtaaacaacttgcagccctagagaggtcttatcgtttcaatggcgtgatcatccataggcggaccgatcacggagatcatcaggtattgataccatgcgaggactgaaaataacagtaaattacacaatatcccacacgatccggtcagaaaccctggatcccaggtacacagaagtactgtaccatgtatcataccgtattgatgcccctccaactttcaggtggatcaatcccccattgggattagcgtttatttcctccccctccatatttctttcaccatttctcaaacatttttccttctcttccctcactctctctctcaaaggcatcggatttgtgaaaattctatccttgagacctttttcttcttttccccctttttttttatacacatccgtcagaatggttcaatcgtatgttggctcgactccttgtgaacagtggccgacacagttgctgactatctgaatagatctgttctgggtttcccccgcatgggaagactccgtgacctcaagaaggccaccgaggcttactggtctgacaagatctcccgcgatgagctcctcgctgagggcaagcgtcttcgtctggagcactggaagatccagaaggatgccggtgtcgatattattcccagcaacgacttcgccttctacgatcaggtcctcgaccaccaccagctcttcggaactatccccgagcgttacaccaaatacaacctcaaccctctcgatgagtacttcgccatgggccgtggtctccagaaggagggcattgatgtccccagtctggtatgtgcaaatcattgcatctggtgtctgaattcaatgctgacttaatcaacaggaaatggtcaagtggttcgactctaactaccactacgtgaagcccactctccaggacaaccaggagttcaagctcgctgccgagcctaagcccattgctgagttccttgaggccaaggccgccggcatcatcactcgccccgtcctcctcggtcccgtctccttcttgactctgggcaaggccgaccgtggccagagcgttgaccccatcactctgattgacaagctcgttcctctctacgttgatcttctggcccagctcaaggctgctggtgtcgaggatgtccagattgatgagcccgtcctggtcttcgaccttgccgagaagtccaaggctgccttcaagcccgtctacgagaagctcggtgccctcggtgcccaggctccccgtatcaccctcgccacctacttcggtgacatcgtccacaacattgatgtcctctccaacctccagagcctccactctattcacatcgacttggtccgcaaccccgagcagctcgacgccgtcgtcgccgctctcggtcctaagcaggtcctctccgccggtgttgtcgatggccgtaacatctggaagaccaacttcaaggccgccattgagaaggtcgagaacgctattcagaagctcggcaaggaccgtgtcattgttgccacctccagctccctccttcacgtcccccacactctcgccagcgagaagaaccttgatgccgagatccgcgactggttctccttcgctgttgagaaggccaccgaggttgtcgtcatcgccaaggctgtcaccgacggccctgccgctgtccgtgagcagctcgaggccaacgccaagtctgttcaggctcgcgcttattctgcccgcaccaacgaccccgctgtcaaggcccgccaggccgctgtcacccctgagatgcacaaccgcaagtctgccttccccgagcgttacgccgagcagaccaagaccctcaagctccctcttttccccaccaccaccattggttccttccctcagaccaaggagatccgcattcagcgtaacaagttcaccaagggtgagatcactcctgaggagtacgagaagttcatcgagaaggagatccagctggtcgtcaaggtccaggaggagctcgatctcgatgtcttcgtccacggtgagcccgagcgtaacgacatggtgcagtacttcggtgagcgcctcactggttacgttttcaccacccacgcctgggttcagtcttacggctcccgctgcgtgcgtcctcctatcatcgtcggtgatatctcccgcccggctcctatgaccgtcaaggagtcgaagtacgccgcttccatctcccccaagcccatgaagggtatgctcactggtcccatcacttgtttgcgttggtctttcccccgtgacgatgtccaccagtccgtccaggctcagcagctcgctctcgctctccgcgacgaggttgttgaccttgaggccgctggcatcgctgtgatccaggtcgacgagcccgctctccgtgagggtcttcccctccgctccggtgacgcccgtgttgcctaccttaagtgggctgttgactccttcaagctgtccactgctggtgtctccgatggcactcagatccactctcacttctgctactccgagttccaggacttcttccacgccattgccgctctcgatgccgatgtcctgtccattgagaacagcaagtctgatgctaagctcctcaaggtcttcatcgacgaggcctaccctcgtcacattggccccggtgtttacgacatccactctcctcgtatccccaccgagcaggagatcaaggaccgcatcgaggagatgctggtctacctcactcctgaacagctttggctcaaccctgattggtttgtgatcctggcgcgatatctaattttctttttcttcatgctaatatcctttttttacagtggtctcaagactcgtgcctggcccgagactaaggcggctctcactgcggtaagaaatggcaatagtcttgaaaacaatgttcaaatgctgataaacacacagatggtcaacgctgccaagtacttccgccagaagtacgcgaaataaattatttcaatttgccattaatttaatgaggaggcgacaatcaacctgtcgcctcagtactggggagttttctttattgatgagttacgacgatgataccaaaagttcaacatatgggtttcaacgggttttctagaggataccaaaagcgggcctggagtttcaacattactgactattttaaactggcgctagccaacattacagcctactttcgttgtggtgttcggttgatgctagttttaccatttcaacattgtgtggttttccacatacagcaagctctacaaccttgcttgatcaagttcgcctcgtgggatttgatctactgcctctatcatagtatagaatcagttgtcaatattacaattaacaatactctgtgtttcttgtagttctgtgtagcctcagtaggtttagttgatagcacctctgccgtggaaatccggtgcataaagccgttgatttgatttctgcaacccatgttcgccgctcctcgttatacctgggacgtttaacttgactagcattgcacgctaacactatatgataaaatacccataggataattttccattgtccttggtataattttccttcggtcggtagcggttgcacagtcattctaatcttgactacagctgctcgtcaaccatatcagcacggaagaaagagcagataatgtaagatctgtcccatcaactcaagtatactgctttgctattcgcattagattgccagactcggcctcaaccaagaaatccgccagtccaatgcgggagttagtacggagaatatcctgtatccataaacaaaagacgagcagattgtgaacacagcgctgatggtatatagagaggacgatatgaggtgttcgtggccgtcgctaaatatgacggggggaatgtcaaacctcaaccacgaacccttcaagttatcctttttaactatgcaccaatttggtggaatatacacactggatgaatactctcagcgctgtattcacgatttattgtcttttgttggaggatctagaatggttgccaacccaggtatcctgcttcactatcagtatcagattgcatggcccatgtgcccccggacgttgaatagtacaacaacaacaagtatcagattattagaagaatcggttccaggtcatggataaacccactagtccaatgcgaaatttggtaaagcttctatatcctccaacaaaggacgagaaggtagcaaatccagcgctggtagcatatatcgaggacgacatgacgtgctcgtggggcagccatttcgagaggttgctacgacccgctccaaaaatatatgaagccatgtcttgagctatccagcaccatagcagatcgcacttcgtgactgcaattttcttgattgcccaaatatttagcaatcaagaataaggatggatttcaaaccacagtacaataaagctgccagtctaactaacaaatacgtgtaattccgatcaaggaaccagacgccgttaccaacgccagcgcaattcaccctaaacaacttcaagaatcaatattcccctttgtttacttggaagcggtctccccgggatttgatgactcacctgccctcccattagcaacgagttttgacgtcagaagagccgaagcaacttgagaggctcgcgggtcgcaatttcgaaccgctaaataaccgtgtcccaagatatgtgacgcaaatttctgtcgccttcgtgaaacgggctaagcgtttattcggcgggtgccccgggactctggcgactagtaactgatcgagatctcgaggtagtttgaagcgcgtacactacttgagaatgtcgcatatgaatcaagagagcaggccaagcccttgaatataccgaaataaagggactcccatcctcgtcattcgacaggggagcttaccgcaacacttctatatacataattcaagacgattgctttctagtcctacgaggagacctagggagtaggccacttgtctcctgtggagtcacagccacagctgtaggatatgtaacccttctattccgaccttgcctgggacttccagtccctcggtccttgagcctggtactatagcgaacctggagagaacccttcgtcctccctggaaaatgtttcacgatccgactccacgggagacctcgtttttccttcagttcaatcaaccgttcgtcctcatcgggcaggaaacgagtcgcacgcgctggttgctttttgctgcaaggttaagctgggtttcaataccagaacagtttggcgactctgtggagggaccattgccgttcttcggactgtgaaacccagtgaggttcgactgtagccaaacgaactttgtgaaacagggcacaggagaataatgagtattggaagtcgactctatagaggaagtgccaaagggaagaagacactatctgagaataagacctagtacttggcaaaatgtttgactgatatttgacaaagactaataattcttgcaactcaaaccggggaatagcagtccaccgtttgcctgcagcgaggtggaccgtatcggtgtcttgacacatcttcttcagtgcctttactcttgccacccgcggcttgaactgtctcgcctggtacgcctctgtgtaaagaatagctgctcgcataggaaatatatccagaatgatgagaagttgcagccttgcggcccttaaggcatatacaatagcgtacctggagggagccttccgaccttctaggaaaatacgttgcaattcgcttctatagcaatctccgctcttccttcaattcaatcaaaagctggttgtccttagacaggattccggttagcccagtcgctttcctagagtaggatcctttctggcggggttgcttataattctagctgccaattttatttttataatatgatatagctttacctaatctctgcgagtaggaatgctctgcctactcttcaaaggtaactaaatagatgatccttaacaaaagtatctcccgtgtaagaaaccacgaataggaatcgtttcgatatcgtgcaaacttattagggaagtccgatccgcgactactagggatgctgacaggctctccgcatcacaacgctatagcccgtcttcgtcgtcatgagctacagccctgtctttctcctggctattaaccacatagctttcggaaacaggctgttattatacttcttggctggcatgctttccccgataatataagctaccggttctaattgtaactcgtctaccttaattctagtatctccaggtaataaatgcgttagagttgattacttttcctagcccatagggttaagaatatagccatttactattatattaccgtctactatatctattatcgggttcgaatatagcaaaatgtctccatctattatagcttcatctacattctaccatatgagccagaggactaggtaacctagctgactgagagagcactaacctatattttcatatacttctgttcggcttagaaattcttcctctgccactaggatgtagaggccaccacgtaccattatgatactagccggataaaccctgccctaaagcactgctagaaatatcatccggcaattctcgactcgccgtatatatattcgatacagcaacgtttgcatttcttcccgaggaggcattcaagaaattcaaactcattcgagcagtcaatggtcacttcttccgtaagctcgttgggggctaataacgtctcgacctcactagatgcataggactgactttgaaggtaatatctcctatttcaacggcaagctctgtgacgatctgagaggatcgtacttgcctaacggggcaggagcggtcacgtccttgtacttgccgcaggaacgactatgccctcgcaccttcccaaaagaacgaacgagaattaagcgagacaaacgcaagagtataagaagggaagaacacgcacttagatagtttctctttttcctttcttcctcgtacttagaatttgattggaattgcactcttttcttttgaatcgaattggctcgtaacaagctctacaatttccccgaggaacctctatcggattcaggactcttgcagaatggtatctcagctcgccaataacgataggggtacgtcctcggtcggattttgttgttctttctttgttctttctttgttctcttttttgggtagcgaaggcattggattatttgtacacactaactaaattgatcttattattggtagtctttttagacctcttggccatcgtttattcttatctttcccttctcgctttgatagctaaaaggcgagaaaaagggtcaacagtacagacgcctttcctatgtataaccaaggaacagttacaatttatagataggaatagcattaagtcacggtagaattacccttaaaacaccccgaggaaatagaatttacaatccaatatgaattaaaccagtaattgaactagtagcgctagtcaattgcagaatgtcgagcaaatagccgaatctatccaaaaagtcttggcacgacgctcctgacgtgactgcgagatgctcagcacgtgaatctcgttgaacccttacagccaatctccccgcgatcgctcacttttgattcaacatttctccaatatggtaccccgaccggatctcagggaattgaaacaaaccgttctcagagcacccaaggatcgaaccctgcggtttagagaagatggaacatttcacattggagtctttgaggatttgcatttcgccgagggtatgtgttgataattgatgagaaatggtcttttgttaaccccttgcagacgacgaaaaagatgagaagtccaaaaaagtgatgtcaacgattctctcgaaggaggacatcgacttcatagtcataaacggcgacctagtctcgggcgaaagaacccaaaaagccgattcaaaaaaatatatcgactcggtagtttccccgcttgtcgaaaagggatacagctgggcatcgacctacggcaaccacgatagcgaggttaatctcaacccggaagatgacatgctcgaggaggagaacaaatataccaacagtttaacgcagagtatgatctccggcgacaaggccggaataacaaattattatctgcctgtgttctcacatggacagacgaataccagcacgccgacgctgctgctgtggttcttcgattcgaagggtggacattattaccagaagcaaggagagactggacctgctgttaaacggcccagttggattcatgaatcggtacgaaagcccctatattggttcgggaaatgactgactggctgcattcaaggtcgttgaatggttcacgaaaaccaattccgaactgaacaagaagtatggcaaagccattccctcgctagcattctatcacatccctgcgcacgcgatgctggaacaccaacaaacaaaaggtgtaaatccccacctgaatcccggcgtgaatctcgagcgcgtgaacccgcaaggaaccggcgaatggacctatgacggccaggacgtcaagttcatggacgcactccttcacactgaaggcttaatcgcaggatttagcggccacgatcaccaaaatgactggtatgtgtctaacaggcagataatagtgacttgaatgattcaaacgctaaatctcgcaggtgcttcaaatggaatggatctcttgtcgatcacgatctaaccgggaatggtatcaatatgtgctacgggcggcatacggggtatggcggctatggaaatctggcccgcggtggacggcagatcttactccacgaggataatctcgcaaacgacaccgagacgtggattcgattggaagatgggtctgcccaggctcatgtcacgctaaacacaacttacggccaggatacttatcctgctgttactaacggtgctggaaagcccgattcctccatgcagggctctttgcttcctttttcttggctgtgggttccgcttatgatgttctcgcggtggaagatgtaataataagtgggttcttttggctataggtcttagattgctatattacttttggacctgatttatgaatgtcttgaatattttgaggatagaataattttcttgtcttcccgagtattttagtcacttctcggcctaaatggattatatacaattctatcttctgtacaatatgacttcctccactcccattcttgccatcttccagccaatccgcagtccaggggtctgagtatatacagccaataacgaccacctacaggtagatgtagcagaaaggaccggagacggtgctcatgagatcgcgcatagcaatatccgaaccaccagcataaccaatgttaatgagggtgtcaagggtagtgttcgccgaagccgggctgttcaagaaagtaccggtgccagaaatagcattcagacgcttgtgcaggtccaagttctgccagatccaccaggtgcgatcaatcataccgtggtggagccagaaagcagggtcaccggggctgacgaagacatcacgggccggatcaccgcccatggagtagtgaccgccaccgtggacgccgatgttgccgctgccggggacaccctgcatgttcatctggaagtcgtagacgttgtcgtggcgcaggatcaggtccacgaccgcggtgaagttggcgtaatcctggacgatcttggtggtcagatcgcgcttcaggcagcgagggttgtaggcgaaggggttctcgctggtttggctgccgccgccggggagcatcagggtgacggggcccaggttgacggtgtagtccttgaaggggccgctggtcacgcagccgccgccgttgccggtgggcaggtagatgatcgggtagtcgcccagactcagctggatgtcgccggcggacgcgacggtggcgccgtttccggacatcgaggtgtcgctgccgtcgaagacttgggatgtctccaggttgccggcgtcagcgggccagttccagtagctgtggttatgttagatattggtaattttttttattttttattatgtgatgcgattgacttacgggtagtcgccggtgtagccacactcgttgcgcatggcttcctcgaagttgtagatgaagtaccggtgccacgcgaggaaggttccggtgaagtgaatctccaaagtctggttgatgtgggttgcgacaaagtcatcgtaacgagaccgcgcaccagggacctccgcggaaggagtcaaagaaggcaacttctgcaggcaaaggatggagctgatgtaggacttcttctgggtgctagagaaagtcctccaatcgcgacggatgcgcagattgctcaaggaacaagtaccacgcttggtaatgtccgagtcgctcgagacagtatcgatggtggtgttgtacgccaacccagccaagtccgcaagctgtgactcagcgatcggcagggaggtggaagcagcggtgggagtcgcgctcgcagtagcactgtccacggcagtggggatagcccacgcctgcgcgaacaaagctcccagagtgagaatggagatggcaaccatggtggcgagttgacaagagcttgggagaagtgttgagccagaaggaatccgggcatgcttgttgatttaatagcttcatcgcccctatcttcgacgtccgagtctaactcgaagcatgcgcttcttgcataaaatccgcgggggtccataatctcccctcttctgctgggaccatttagggcaccgggccatacgttccgctttctccaccgggagacgccggcaatttgctatcgcactttttcccttaaactcagggttttcggtctattcagggatcctcttccctgcaaaaaaccgtcgggtcacttacggaccgagccttttagactctggggatcccatcaactccatatagggacgtatgacgagaaacgcatattactacaataaatctgaagcaaataggaatcagccaccacgtggtccccttgtcgcttggcaatttcagctaagcgacaatccctgtggccgtctagaccctggaagaatccaatttattgaatttggccaatttaacaacgtggtcgctttgggaaattaatcaaaatccagccaatctcggagtcacgcccctcctagtgccctagctgcggccaagtccgtaaactccgactgcaagctacctatgcaacccttcccagtacatccgaggggctcatctccttgcttttcttaccgatgatgctccgcctgctcattggccatgtttcgaatgacgaactacaacccggctgccgggtctgaggcgtattctggaaacctcttccattggagggaatgcattgtttccatgcaggcgtcgaactttcacggaacacagataatggcatttgcgttttcgtttttattatgtccgacgtcgcttgtgaaccgctcaaaggagactgttgacccgaagttgaagaacaagatgaaaccagatgattggcctgtggtgcttaatcgaagtagaatagatgaaaaaagcccctccatacgagactcacgccaccttcctcttggcttcggggaccacagtgataacttggtagagctgactgtaatgcgaaacctatgatacggtgtacggggttctatgtattaaatctataacctttgggatgaccctgtcaatttggccccgagtataatccctgtctgacttctcctctcgatgtctccttcataactttttacgactagccatgtcggacggtccgcatagcagggatgtgaatcccccagatgtcaatcaaggccctaggattctcatagccacggctatcactactttcgccgcgttattcaccgttttggccaggttctacgtgcgcatcttcctgattcgcaatgtcggctgggatgactatacgatggccctgaccatgctgctgtctctctgcgggttcgccattatcgtccccgaggtgatatacggtgcaggcaggcatatgatctatgttcaagaaacgtctgtaaaggcaatgcatttgaattatgctacccagggcatttacatgtgggccattggcctggtgaaggtatcaattgggttgtttttgcttcgtttcgcacctcgaaaaggatacaaggtctttatctgggtggtcattggtgtgtaaaggctttatatcttcttctgcgtcttactgacgagcccggcgcattgcagttctcatgactctctacactgcgatctgcttcttggtgcgtgccttatccccactttcgatcgacagcaactaacaatccgatcgatcgcagactcttatctttgagtgttcagatatccgatcaaattgggatccttcggtgaaatcaaagtgcttctctcgtaaacaacttttggttctgacctatacaaacactggtgagattcgctctgtatgggtttaaataaacgttttttaacttgaacagcattgaatatcctgactgatctgatcttcgcggtcctaccggttttcatgctacggtatgctatggtcatcgctctcttccgatgagatgctaatacaatacagtcatcttcaagtcaatcgccgagtgaaagcctctctcatctgtatcctaggcctgggagttttgtacgcgacttccaatccaatcccgtcataagccatgctaattcatctactcccttagtgcctgcgcagccgccttcgtcaagctctctatcctatccagctatggcagcgccggcgacttcctctgggacttttcaaacctcacaatctgggtcgtgtaagttaactagttatccaccactttaagccattctaacaaaaaatagcacggaatgcaacacaggtatcatcgcgggcacgctcccaaccctcaaacccctcttcaagagattcctcggcacatacggctcccaatccaaaacgacacgcgagtaccccggcagcaataaatacaaattgcactcgatgtcgcgatcacggggcggaccgctccaatcccgcggccacaaaagcggcaacctcagcgtcatcgagtacgatgccgacccgcagaaccaccgctcccagctcgcgtctacgaccggctcggcggcgtatgcggggagtcaacggagcaattccagcgaggagcggatcttgccgattcagggtgagggcatcgtgcgcacgaccgaggtgatcgtttcgcgcgagcagaatccgccacagatgtcgcccggccccggacagacttcgccgagattgaataggatggggtcgctgaatggattacgtatcagcgccgatgatagggtttaggatttgttttttcttttgggagttatagggtggcaagtttattcatattgatacccgaagactacaacatacatgggcatataatctgtgtatctataataaaacgttgcccggttgttacacattcttgaaaagaaaaagagataactgtcttatctgtacattgcgctaggtctgcaaccgaggtactctccctttgcattccgaataaggggcaaagggatgacgatcaatcgatatacgaagtaacaaagtgattctgtattatattttgagtttgatatatgtaaccgtaacaaccgtaacaattgaaactttggaaccttcaaggttggagtcgggaaacccccgaattgtttccatggttcttttattcttggtacgctccaccaggtaccagactttcacccacacccgcaggaagtatcttttatatagcaattccatacaaaagctacctatttacagccttttttacgggtggttacgcctactaccccagtggtgacgcatacccaagcgtcgacccttaggggtccaagggtcttaagggttcagagaattgcgtgcaagtatcttttgtattgagttcctatataaaagatacttgattttacaattcgtgatccacctagttatgtagcttaccccaattaccagatccaggtcgggcagatccgaacccagattcggtatgtatcttttgtataacgtacccatacaaaggatacttgttaattttcctcagccttcggactggttagcgggaagcgcaccaatatataacgcgagcctagctccaataattgaatgcttctaacaagaaataaagtttaaaaagacactaactatatagtacggagtacggagtagttgcagaaacaaacgaaatgccgttcctttaatatgttaaacattcccattaaacttcaattaataaggtagactttctttgaattttatcatatcttgaaattgatcttatgccgatgatgtacttgggaagtatcttttgtattggccaaccatacaaaagatacataatttctggatatggcggtatttaccgctggcggagaaggtatgtgcgcacggttacatcggacattgctgttgcactccacttctcttctaaatgtctcacattgtgtcggttagcctaatgctaggatagtggcagcaatctggatcacttgtggaatcctacaacatatccagggcacaatcctaagcgcaacactccctaaccaggactcgaaaacgccagccctgaacctcatcgacacatcgttgtccccacttggtacagccgaagatataacccttgaaccaggacaattgagcatttctatgctacttgtccagatggcggcatacttaaagccacccggaagctgaaggatatgctggacgagagaatgctaacacttttacagtgtgaccgaaggaattcagatccagccagaaacaatcgtatttggatatcaagctcgggaagccactaacgagaagaataaaaaagaagatatcccggagagctcccatttcacatccacgcacacccagggactacagcgcccctcccagcaacatcgttctccccaaacttctcaacataccactttcgtccccagcgcgcatggggcaacatattcgtgaccgcattgacaacaaacaccacagccggcaaaggcagcggcacagcgagcttattagccgcccacgcagcaggcaccaaccacggcgctagaaccagcgggggagtgatggccgaagtcgccgagacagaggccggcagggcggagaaggggacaactgccgtaccagccagagcaaagccaatccattcgagccactcgaacacgtagtgcggatacaaaatgtatcggaagacaccacgagagggtgggatgacgtagaccttgtggaacatgtttccccccgcccgaggttggtcatctgcctttttggcagcgcgcttttcggcctcttcgcgccgaagtcggaacagggctgtctctgagtagatgttgccggccattccgatagcaaataagattacgcccgcggtggggaggagatctaccaccgcggagcggggacttccgctgctagccgtgaagcttgggataatcggcactgtatatccgcgcaaccagccggccagacaggcggagttgaaccaattgaagaccatggcgaagaccatgatgctggcgtggattggggacatactaggcgcggagaagaaaggggagatgatagcgcggttgaaatagtgtgtgcagtacagagttacgatgaggatgttggaaacagggagatcagtgaaagagggtgcatatggcgatggagtgaccatgctatagatcaagttgatagggccgacaatctccatggcagaccaggcgatacgtcctgggatgttgaagatggactccgaggaggttttgcctgctgggtgccaggacagaatccattgaattgccgtcacctaaatgtcccgagttagtctggtagcatctctccaaggcttcagggtcctgaccaggggaaagtattggaagcagcatataacagaggtgtagacagttggggatggagggaagagctccacagcaggaggcagagctcccaagcaagtggaaatagtcgcacccatttcgattgagagaagagatgaagggtgaagatggcggagggtaaacaggaagcttaaagcttatgtggaaggcggtgggtcccgggtaagcacttaaacttctgctttttgtttttcttttttttactttgtttagtcttttaaatcttttagaagaacaaagcctgttgggtatattcctgttgggtatatcgatcagtatggcaatttctaacaagatcggtgaattgtcgacttgagaagggcacatacgggacaattcaaacggggtcgtgcaaacgaaagtcctcctacaactacaaagggtaagacaagggcaaattaccagtttcagcaagtcggcgacaagactatgttcgtttgattctctacttgacaaaaatcacatgtgtaaataactaaggggatgattccacatagacagagtgtattctgtaccgtaaacgctaatgccctagacaagcaagcttgtgaattaaatcataaaaagctccggctccttaatttgaagtgtccatccgatcatgcaccatttccctccgtttgccagctaatttctcatttttgaacgcctcaatcttggctttgagttcggtatctagaaaggtggttaatactggtattggaacaatacctgggaaagaaaattacttaccagctactacatcctcaatcttcaatgggacacggttaaatggatcgtgggggtcactcaggagatgcgagcgaattgtagcgcggtcgatggcgatccgtgagctgggaagtatgacgggatcatccatgagggaatacattagaggatctaaaaaattagcagctgtcgaaaaaggatagttcaaaaagggaaaaataccgaggaactcttcagggatctcgcccatgtcttcctccgcttgatcatcggcctccttggcagcctggaccttcttctgcagctcactccagtggtgaagctgctcgggggatttcagcgaccactttcggataatatcagccgccttctcgaaattggctggcttgtaggatcggccatcacgggcaacagccaggatgaagttttccttgccgatcagattaagatagacgtcgacaatctcactcagaagagcgcggggattgaagccatattcctgcaggttgtccactcggagattggagctcttgggtcccaccattgcgtcgagattgtagtccagcatgtctgccagtcgctgcacaatttcaggcattgtgaacgagtcagcaagcgcctcagtgaatagcttgagcattgccacggtttgattagtcagttgcatgtagctcttggcgctgcgctgcgctgatgacaggttctcctcccgctgttggcgggttgcggcatccattgagttgccctgtgtattcagctcggtctgagtgttgtggatagtcttgaaagcaccgaaagattcatcgaggacgtaagtcacatcgtttagtagaaggttaacgaattggacgaagaaatccaggttctgattggcttgaagggacaacttctcccgatacagagtgttgggccagatgcatttgatgatctggaagatctcgtaacggatgttaaacttgtcgtagaattgggaatgtgttcccgtgaactctgcctcaatatagaatttcatgaccgcatggaggagatgttcgttggcaaatggcatgctgttgagcaagtcgactaaaacaccactggcgccaccagggcgcttccaggtgcctcggaacagaatggagatcagtccggctttcagatagggattcttaatataggtcgagcactctaggaatgtgatgcacagcattaccagctcatctccctgggtggccgtaatgatctgtggcatgcaccacatgataaacttgaagttactgacaacatcctccaagaagtactctggtagacatttgaagacttcgggctgctcctctggaagaggcagggtaacttgctctttggggaagttctttccagacacaagtctcagaagccacacggtaacatatcgcatgaatagcatagaacgagcctgccactgctcgtcgaacaacacaccttggagactgtatttgagagcgatgcccagttcgagcttgtctttgtacttcttcagggccgtatcgaaggtgcgcaattgctgtggattgttgagccaacgaacccgctcaagttcaaatttagtgattgtactctccatctgtcgcacatctttctcgagttgctccatctttgacgtcaatgattcactgccgtagtgatgggcggcgacagtcaggaagaatacttcagtgataaagtttgaagttccctcaaccttcttagaatagaaagcgtcggaggcatgctgatcggcattgattttggtctcatcccgcatgtcaactcgagaatcgcggtggagataatctgcatcaactctgtcgattttggtgaatgctgcatccatgaacggctcacagagctggtcgaggcaagttgtaatattgaacatgaagccgtcagaggatacttgcgcagggtcaacctgcatggcccgtcgtttgtggttgatgttcatagcagtcgcgaaccaatctaaaacacgatctcgagcctctttcgaagcccggatcaggtggttgataacatcaagaagatcagaactgagcatctgctgcgtcattcggagcgatcgctgggcattggaaatgtatgcctggtccctggtcttggggctagagaaataggacagggtaacattagcttgaaggggtgagaggcggaaccatggacccaaaagagtggctttctcgaattgagcagggtcccttgtgttgttgaaaatggacgattctgtgattgctgccgcgatggaaccgtggcgaacaaggtttcgaagagcctgaacaaactggtcagacgtggtccagggaaattgtgacgtttgacttacaatggcgtatggcttgtagtcatcgttaacgtccatagaagagagctgcgcgctcaactgctcgacggcagagataaaggcaggcttgacggagtcgtcttcgtcgaatcttctcacagcttcgttgataaactcgaaatcaattcctctatcatcctcggggtcgatgagaagatacgaggctaacgatgattgaggggaccattcgctcctacagttcagtcagtatccagtgccagtgtagcagcattccagagaacgaacccaaacatctctggcattgtaatcgcaaagatacaatagctcatacacaggcgccgtgcctcacacagaacctgatacttcgggtcatcatctcccgtccgcctcaatcccttatacagttttgtgatgcgcttccagcacggcagcagatagtcgagtggacgctgcttctcggcctttgacgcagcctctaggagggcctggtccagaacctcaacctggatgcgcaagtcctgaccctcatcctgcagttcgctccgaagcccaggcaagtatgtacggctgccatgtatgtcacgatgcccttcttccttgagggtcactctgaacacggcacttagtgttcggtcttcgaaggcctctatgctttcgattttctgtggcggaggggtgctcggggctgagggagcggcgggtcgtggttgctctgatgaagccgcggccggtgtgatcttgatccgcttcccttctgactgctgcggggttggtggcgcgttgaaaaggcgactcggtggctgcaccgacagtggtgattgtgacggagatgtgttagatgagctctgtgtcgattccgaggcaccgtcggaggactggcctgggtttgagagctttgcaagtcgcttgttgcgaatcttttttttatcaagatagatgtcagtcctcgagtcgagtcactgcgggggcggtatagcttcatagctcgagtacaacaagaaactaaccttgtctgcgtcggaaagtgtgtccgacatgttagctgatggtcagacaataatctgctccagagaggttggcaagaccgctaatctggtggatcgagtcggcagaatatcaatattgtcgtgacggtgtaggaatcataaggcgtgaaagcggaatcaggcagctttaaagcctcgaagtgggggcaatggagtctagaatccgcagatgtatgtcgctggatgagcacttctgattccgtgatgatcgccgagattcgcttttgttctgattcgagattcagcgcggtgatcgaatttgactaagcaatccatggttgggcgtgggatccggggtacatataaggtactttggggtttgcgctaactatgcgcaaaatgccaggtacctatcaagtcactttttttttcctttcatacgttcgaaggtttaggttgttggaacataggaacatcttttctatgaatatactgttctagatattaaaaattggataacttgatatctacaggatttgtttatgtttcagatttatggccgcaacctcgacgaacttttgtgtgacactatatatatcttcatgtattcacatcaggacatgacatcagaaacgaaaaccaaagattcttaaacatcaggggaaccaaaaagagaaatttagcaagatcctaaatgcatttgaaactccaaaaaaataaaatgtacagttgattaactgagacccagatgccacctttgtggatgggctaatgatattagagcacgttcttttgcaaaaagagcctccaaaaggaacaaaatgtcataaaaaggcgcggcgtaagcctccaagtccgcagtgcatttaatatctcaccttcgtcttcagttggtccagacgcctgcagctcggcatctccatcgcacgagccttcttcattttctcaacgtcagggaagagccacccctgcgcatcttgcagccttctctcccgctcatgggcttcggcgtcacattcattccgcagtgtcctgacatattccacctccacgcgcgagtctagctcgcgaaagttccgggcactatagctatccacatcgagggggttcacaaagtagttgaggttgagtttctgggtcacgcggccgagggtatgcggggagacgggggtatcaaagcgataggagggtccggatggggttgaggagccagagaagagagaggagaggagcggcaggataaatagaatgataagcggcaatagctggcgcaggaaactgcggctatcgatctgagcttcctgctcggtggctgctgcgcgaggccggcgacggggcgcctggcctccaaactgatgcactcggaacccggggccacctcccatgttgaagacgaattgcggaccgcctatagtaagacaggattagctcgagtaaaacgaatatcagaggaagctgtagtaccgaatccaccaccgcccattccgccaaatccaccattaaagaaccggttgaacatttcctcggctgagacttcctcgttgaatctttggtcacggccgaatccaccaccgaatccaccgaagggcgacgcgccgctcgaagcgctcggtccgggttggaacctgctatcaggatcgccgccgaatttgtcgtatttcgacttcttttcctcgtcggagagaatctggaaagcacgcgagaccactgccaccgcgtaagaatcaatatgtcaagagtttggctaggggtgctcattgctcactcttaaacgcctcgtctgcgccctcgtgcccgtttttatcaggatgcgtcaacaaactctgtttccggtacgccttcttaatctcattatccgttgacgagcgctcgaccagcagaatttcgtaaaaggccgtaggctggcatcttcgaatccgaagcacagcagctttctgctcttctgtatacttgcgatcctggttaccttgcttatggtcgcgcgacgtcgcacctccgcgtttggcgtcagagccagatgccgaagccgagggcatagcgaccggagtttatgggaaaaatcggacagatttcgaatcaacgtttgcttgctggtgtaggagggaagagggggtcgagagaatcttgagggcgtagacggatagaggagaagcaatcccgcacgggatacggtcgggtcggcagattaatcaaacgtgtgatgagatggccaaagtaaaatatcggcctgatcaagacgcagcaaaatcagagtcacaggagtggctgattcggcgggcatgaattggggaaaaagcgtggtcttaggtgtctttgccaagcggcggaacgtcaattagttacattggacatcgcgataacatcactcgccaacattgaaaccgatagacttgccaacatccccaagtccgcgatattcaattgtgagtgttctccaggtcaaaggtcaattaaagcacaccggtcttatttatatacctgcagcaaacgcaatccttggccgccaaagctcgcggtcttccggtttcatcaaataagtcctcgaagctcaattcctcaccatggcggacgattcaactgtcgaagagaccaaggagacattaatccagcgcttccgagcctggggtggtaagtggtatatgcatatgaatagcttggcttcatcggagcgtccaaacaagcaatgacgccagtgagcactcactaatgtcgtctctcaactgcagaaaactcattcccacccacattactcgcctccatgatcgcagcccagcacatgcgccctttccagttcttcccgatgctctttccgcctgtgctgatcttctccagctatgccaacctgcagggcttcaagacggacactgccggcatcagcggggccgtctcgggactgtatctgcttctcgcagcccgccgtcgacagccatttatgaagaagctgggtgttcggggcgtcgtgcgcggtgcgaccatgggtttggctttggtcaatatgatcggtggtgggttggcgtatactctaggtaggaaggaggaggaagaggatgcgtcatgatcgagtgacaacttataacgacgcgaggaccgcgatgccatgttggtgtcgtggtctgtttgtataatacgtgtatcaaaagttggctcagttgtgcgtttggcacgtgggtgagttcacgactcggtctcggtgggcatgggttttatgaaatatatgcattatcactacgaaatacacttttggagatagactgtaagagtctccagtggctaccacgcctaagtaactacactttagaatttccagaatacagatgctccgacagcaagaactgccgcacctgttcaggaaccagccattccaggtcctggggcgccgattgcgacgcctcacgagctctagttgaactcacgggttgatcagtagggcgacggccctcgacaagctgaatccggtcagcccattccctacgggcgccgtcgctatctcggtcacccctagcaagggccgccaaaaattcttcctgctcctctctcccaccccatccatcgctcgggcgcatagtcacacgtagtcggtgctttgaaaatagaggcgctagagacttcaagttatgttcaggcggatagtacttgagatcgaagatccggatcaaagtatcgtaacccatcagatgaacctgttccattggagtggggtaagaatccgatgcctcgatagcagccgccttgtcgatgaaatagggctttttggtgacgccgatatcgatcaacggaatattttcgacggcatgttcgaaagccggtgccgatgcgagttgggggcggagatcccgagcgaacagctccatcatcgcgagccgatcctcgaaggaggcaggcttggatggcttgtctgcattatggattgcgagaagaaggagcagacgacggcggggtcgggagttttctagaagtgccgtgctgacaatgcggaggtgggcacgggtggggggattgaacgacgagtctaagacatagagagtctctgggtctgcggagggaccggatgggatggttgttaggacttcgaagactttggttgaggttgtgaatgccttcagtcgtgaggcatactgggttcggagggcttggaacgaggacatgcttgtcagttgcttgactgggggtgatcgtctctaggaaggttgcgatgcgggccgaatgcaggtgatcatcgcgataagatcatattgtcaccgccttccaaatttggaagatttactctatgtaaccgacattgaagatattccagcagatggctccatgatactccgtacatgtatttaggatcttctagcggggtcctaagcaagttccattgctactccgtactccgtccaatgtgaatattcctagtctggagagttggagggtacaggggtacgaggcaaattgtaactaatttccaagtgggatgtttcatgttggaaagcttctccgtgccgaccacaaacaggctacaacatacacgggaaacgggaaacgggaaacggaagcgaaacactctgaaaagataacccaagtttttccaaggaccgtgcctaacccaggctagacctcttttaatcaattcatccgatacacttcttggcggattcgagagatgtgccccaccgcctcccacagagacggaattaaagtgcattgtatactccatacatcttcacttttatatggaaagagtagcatttatactgccccgtggagtccagaatgccatctttatctccaacagcaatttatatcccgacaatggcggaagcggggaccctggggacacgggtgggagactgctttatgtgaaaccttcccgtgcttgtattgtgtatatcgcgtattattacagacagtagaacattgaaacttgaacttcccgaaagtgccgcggtcgtaatttttttttctctctgaatgaagatcgtctggattctcgggctttgtttcctcattggaacacatagttatatacaatatactccgtacacaactagtaggaggtacattataggcctatagacgtggccgggtattgtcagacttttctgcccctgggcacgttcatatatgaagagtccgtgccctaagaaaccgtttagcgacaggagtacaaaagtacggagtacacaaactcgtacacaaactcgatggcctaatacccccttttaagcactctatctaaagaataggggcggatacaaacagcatgtcagtgacgccaccgacgccacatcaccttaatccagaaagcccagtcgctaagaggctcatagggtttgccaatatcacgtagtgtgttgtatatcttacggtgagattaaaggtcacagtccaagtgcccacgggctgcttgggatcaatgccaatggtccaatgagagcccggttcctgggacggtggacacgccatccatggattgaccgcagatccaccggtattaccacggttggaggtgaccaatagggaattaatttaaaattgatagtgtagagtgtaattttaaagcgaaattggaggaaatgagttaattaccttggtctccatcttctctgctctctttccttcttcaagctggcatctcttgactacttcttcttcttttcttctctgtgagaagccatacgttccttccttgcgaattgatttcgcatcttgctctgtcgctctttcttcagacacacactcacttacacacacactcgctaactttgctttgcattcttgcttttgacatctctcgtcttacccctccactttttcattgacatccaccgtcgtaccaataacttcatcatggttgtcatgaacaagttctccgttgcccttgtggctgctctggctgccgtgggtcaggccactcacgagggtctccatgcccgtcgcatcgtggctcgctcgcttgcccctgtccccgaggcctctacggcttctacctcgaccgtcctcgttgtgcctactcctgtcgagccagttcctgaggctacttcgactgccgcgtctgctcccgctgaggagacctccgccgtggagtcttcctctgccgtggcgtcttctgcccctagctccattccttctgttgcttcgtctgtcgttgctccgtctgtcgttgccccgtctgtcgtggctccgtctgtcgttgccccgtcggttgttgctccgtcggtcgttgcctcctcttcggtcgtttcggcccctgagttgagctccgcgagctctgtgcccgtgttctccagcaagcctgtggtcacccgcactcccatcagctctcgccctggtcttcccaccaagtcttccgatgccctgtccagcaccgtgtctgctcctgctggcacttccgcccctggtgaggctgtcactgtgacttacaccgtgacctctggcgcctcgactagcgtcatcaccaccaccatctacaagaccgccactgaccagtacaccatcactgccgtacgtgttagatctgatatcttatgcttggtacttgtgaactaactttgatatagaccgagtctggcgctgatgccgctgccactaactctgctgatgcctccgccaccaactccgctggtgcctcggtcactaaccccgctgaggacaccacctccactcggacctccactatcaacagcaccaagaccaagaccgtcactctcatcgagatccccgcttccaccagtgctgccagcagtggctctgattccagcagcggctctggttccggcagtggctccggtgcctgctccgccgttaccgttaccgctactgtcactgaaaccgtgactgctgtatgtgctgctcattcccctatcttacacgtcaaatattaacattattctagggcgccgtcgagacccagtccgccggcaatggcaacggtgagggcgcacagagcacctcgactgaggccgctgcttccaccgagaccgcctcggtttccaccacccgcacttacactgcatccacccgcgttcccatcacccgcactcctactccttccagcggcttcgctacccgtactcctaccgccagcgcaactgtcaagcctactacttatccctcggccaccagcacccccactggcgagactttcttgtccaacctgcgccgctacttcttctaaacaacactgctgatgtgaagggggtttccacctccacatggcagcgagttgcgagcctatcgatggcctgagagaaagttccgattcccttctactcgcgcagaggcgtgctggtactgtacctattttttgccaagttccggtacaaacggattcaatttcacttcttatttacgctccattttttgccatgtttcttcttttcgacttctattcttgcaatggtcttgtcatgctggattttgcattggcccacgttttctctgcttgttacgttttgcaggcatcttcaattcggactgcggtgccaatctccaacctcatgacatttccttgcgttacatttttactctccaatgtgaaattgacccattcatatgaccggtttccattggactcggaacattttctcacgtatcgttatgatgggtggtgacacgtctgttttatggactggatcttgcctcttttctcttgtgttaatggaaaattcatcttgtttaatctttccacatttcatttgcgaatgatctcatagttctgtttttagtcttcatgtttttctttccacgtggaaggccgatatcggtatccttaggacagaacctgaattgacaaggctttgcctgtttacgaaatgatcactactccctttaataatttggagatcagtagaaatagagtgaggctgttcatcctggagagttagtaaggctggcctgtggatcagtgtcgatcttcttgcgctggcagaaacaacacatagttgacgtcgacatacagtctacggagtaggatcgtgttattcgtccattttagagtattaatgtacgtaaagtaggataatatacaaaattcgaccaccaacttcatcctagaagagctcacggcatcacccgtcgtcaccacccagcttggctccgctcagaatggatactgacatcttctatggcatcgaatccaacgcctcaaccccttccctcgcaatcctctcccgcataatttgccattcaacccacgtcacaccctgcaacaaacaatccgcaagatcatcgagtttccccagatcaacagccgccacctcgtcccccatatcagacaaaggagatccaggcaatggagaaagagatccactcttcaaagcccgagaccccttcccttttcccttcttcgacgcctgcgtctggccctgccatttccgcagatacgcacccgcaacagcatgcagggcaggacactccgatttatccgcgagcacgatcttattatcggtagcagtacccagctttaattccttaagaccgccgtccgagtctgggggagcattagtctgcatcgcagcagaaagccaccgtccaacaagatcaatcttagccttcttcacttctcgcgcattgggtttcttctccttctctttttccccgacttctgatttctcccccgcgtctccctttcctagaactgacgaaccttcaagccaatacctgactacccgcctcggctcaacaccccgaataaccaaatcagcgatatccccgcccctctcctgccgcagcgtatgcagaacagcatataacatgccctccagcacgccaacgcgcagcgtccactcaagcaccgcactcccgccgcccgagcggaagcgctggcgctcaatgagcacgtgagtggggcggtatgcagcgataagtgacgagatgagggtgtacgcatatgcagcgtagacgtctggagcgaaggcgtccttttctttttctttttctttcgtaatagatttggcgatcttgccgggtaggctcttttccgtagcgccagcgccagcgtcacccgaccccggtgttggtgttggtgttggttggatcacaccggtcttagcccccggtacgaggttcagagttgatatctcagaaatcgcgagtcggtgccaggctgtcagctccgggggttggaggtgggttgttgctgcgtcatctggagctagacctgaaaccccggagcctccggagcggggcacgcgcagatgcgcgaatgcgaggttctggatccccatgtcgatgctgaggatgctccatggttgggattgagcgggatttgattttgacgagtcggctgacttggtgttgggatttgtcttgcttgggggcgtttttgggggatctagccgtcgatcaacttgtcgatcttggtttagactggggttggtgttggtgttggcagcactgggactgggccttggaatactagtgataccctctgcaacgccatccacggcagccggcagctgcagctgcacctgtgactgcgactgcgattgtgactgtgaatgcaacgtcaactccgctgcaatgcgctcaatgagaacacccttcgtaccggacgattggatgcccgttgcgcgtgcgatgcgctgcaattgtgctgatttcaagcatgcgagccaagggtgtgttggggagtacagcgctgcagagagacgcatttgggggcttgtttgtgcttgttgcttgctaggggtggcatttggtggggcggggtctgggctcctggtacgaggtgaatctcaaattcctataacggcagttttaggctggatgcatggacatttttgggaaatggattctttgaggtggatgggtgctgatcggtgcacggaccgtcgacgctcacggctaccgtggcactgggtcggattgagtttgatttttgttatttccaaggttctttctgaagtttagttgcgatagagtagactgtcatttcttagatagacctctactatgttgtagtagctgataataacaagtaaaattatatgcgccttctatttcccagacgaaatataacaccgagatcaccttgtgttggtagaacaccaggtgtgaataataaaactccccccataagaagcagtaaatgcgcgctgaaaagccaagtcaaacaaaacacttgcgaagacagcaaggcaataaacaaccgacatcaaaaatcctccaaaagcaaaagtaaagagcaaaaccaagcaagaccaaattatacgaatgctggctgctcaagctcggtcattgcaatctcatctcggagatacaacaacggagcccaaacacgccagtgcagtacacccaaatgagcaagacgtaccccaatacgctcgacatccgactgctgtggcgtcaaagccagcgacgaagtattgttcactgacccagacgcagccacagtcccagtctgaggcacagtagtacccagagtggcagacaccggagcccgctgcgactcacagatcgccaacggcgaaagcggcaagtatcgacgagccgctgctatcgtgctagcaaggatcttgccacgcatgctattttggaagaaaacgaagagctcggactcattcgagagatgccactcgagcgcttcctcgatgggaacgatgacctcgtccgtgacgacggggtcgagctgcagcgcggcacaggcaaagcgggcaatctccagagcaatacagcgcatattttgcgtccagcgctttccgccgcggtggtcgggatcgtcctcgttgttgtctggattgcttgcgatgcggttttccaggtccataccgttttccattagggaccagatgcgcgaccggaaggtggagtaggtttcttctggggtggagaggtaacgcttgtgcttgttgatgtaggactcgaagatgtaccaggcgatgtcgaggttgattagattttggacggttgagcggagctgccagaggcgctcggagtcgaagaggaaggtttcggggaagtcggcgggaggggcgaattggagcagttgggcggagattccgcgaaacagagcttcgaggggtttgagattgctttccgtttctggagttggggttgtattttgggcctccgcatctgcatcgtcttgacgggcttggtcacgcactgatatgtaccagtgccgggcggattcgacctggaagccgccgcgattcattttgccttggaagtattcttggagaaaggggactgtgtcttcgatgaggagaacgcggaatgctcggatttgatgattggcgacgtcctatcaagtcacgaattagttaacgccgcaagaacagagggacttgaatgtgacataccaacttcatagcctctagaatagagaacaatgttcgcagaccgctgacaatctcatggggatcctgcgactctgaacccttttggatttgatcgaccatagaatctgcccactcgtctcgcatcggagcacaatgtgtttttagtagtttcgctagccaccgagccagcgtaagcatgtcgagaacgcctttgcgtatttgctgcatcagcaatggaacttccaggttttgcatgatagttgggtgatcgcgttccggaacaagggtcttgatgacgtcctgcaatgtctcgaacagggcgggcaaacgcggatcgaaggcgtgtcgagtaccatcacttgattcgcttttctcggtggcaccggcagtcgcggcgtggtaagagtaaatagtaatctcggcggccaaggcatcccaataatccgcggcttctttccgcttgcgttggcccttctccccgtccaggtcaggcttgaagtgcaggtcgcggtcgaagttggcgtccatgcggaggttgatgttgctcatgatacagggcagatcaagctcgctaagcgttttcttcgtgactggcggatatctccgagccttacgcaataggcgatgttcacggggatctagtcccaaatcttggggtatactgatagcctccggggacggggatggctctcggggccgagaaacagcggctggtaccggtgaagtagattgttgagccgcatgaggataagcgaagggctgttgacggcgacgaagaggatggatggagggtcggtcgtcatgattgtgagaatctcgcccctcgttcttgtgatactctttagaacgaccatttcccgcaccatacgcctctagagggccttctgcgccctcctcctgggtccgggcttcttttgtgccttgtagatccatagttaagcacgatatatctgaacctccctactcagacagtcagataaaaggaagatttcagggtggcaatggcgagaccacgccatgcacctaaccacagaacaaggcgagtacgcccctatggaactcctacaactcacaaatttaatgggcccctttttgcctcaggcaggcagccaatccgcattcaccgaaaaagtgatgcaagtgagctgtcaattcctgtggagccgaggattgcttggatctgcgtcgatcgcctcgtggttccgatcagggggagaaggtcaaaaaggggtggagattcaaacgtttttaaaacaacaaaagggtacggagtataagaatccgaataagagagaatataatcttccaaaacaaagaggtgtagagtatgaaacggggctccgatagcagcaaaccagggtggggactccagtgtatactctagggcagacaaatgcaaattgtctcgagagagcacaaggatgcaggacaaatggacaaatcaaaggaaaaaagtaaataaagcaaaggagttggcaaagcgaccgggatgaactgatatagcgagtgtatcccagatcgacaaccggattcgggttgacgcaagcagacattcccttctgctgctacccgcgagcagactctcgactacctgggagatctcaactgtcacatctttccatttccgatttgaacttgcatctgcatttgatgttgcttttgggaaaaaaaggggggtactcgcctcactttgaactttgaaaccagtgctggccacgtgagggtgaatctccttttctcggggaaccactggatgcagtcgagttgcgcattaccaggtgcatagtaccctccagcttgccagagaagtactcagagaagggttcacagatcatcgagaagagatgaagcagggcctctggtctggatcggaatgtttttggatgtgaatgccttggtgccttatagactttatgcctgataaacaaggccctatatcccttgagacagccctattctacttctacctcaccacttaacttccaccaattgagcttctcgtttagctcagatctaaataaaattactgtgattcatgaggcatccaatgtttgtagacggatatgagctccgtcaagcacccaagtccactggtcatgtctttggcctcaataacctcgctagcttattgacacccaaatctggctcaacaacggcctgctcaatagctcaataagaaccatgtctgacaagaaataaaataaaaaggaaacatgatttccacgtggaatcttgtctgcatgagcatcctagatctttactaggcagtatcatctcgattatcttcacaaggcgtgcgaagcacggccagtttcaatcatgaatatttccgcactactctacttctttcagatcctatgggcagctcctgggcttgtccgctcgcgaggaatcggttcatacaatacttcacgatttgaagtacatgccttaccaggcgtttcggacctaccatccagctgggctggtcgccttccggttccggggacagaggatggaaatgagatctttttctggctatttcaatcagagcagccggcatacgatgacaatctgatcagtaagtctgattggagggacattcaaaggcgatggttaacaggctggatagtttggttcaatggcggccctggctgctcatccttgataggtctgacgaccggcaatggacccatttccttcgatggcaattcgactcgatttattcgcaatccacactcatggacaaagctaggcaatgtgctttacgttgatcagcccgtcggcactggctactccacggccagcttcccatacccggttaaggacaatgttcgggtaacgacagacttcacgcagtggttgcgtggcttcttcgaatatttcccgcaactgcagtcaaagcagatccatctgatgggggagtcatatgcgggcatctacataccctatttcgcatcggagcttctcgacggcaacaattccctgcctctcaatgtgcgttctatgtctctgggtgatggatcctggggaaatggagcagccatggcggacgttgcaatgggtaaatatatcaggtcacagttgggcttcctccaaatccctgaagatgttctatctgtcttcgacgaagccgataaaacctgcggcttcaacgacgtgctagcaaaatccgccgtataccctcccctgggtaaaatacatatccccggaaacccagaatacttcaacctccgacgtcgagacttgacaaatgccgtcaacgcgacatgcgacatctcacccaaaacccccgaagcagtccacacatcaatcttcaactcaacttgctacggcccctgcgccgtcttctctacagcaagtgattacctgacagccgtattcaccaaccgcaaaattcggggctgcttcgacatctacgacgtttcccacgactgcagtgccatttcagagctcccactaatggcagagtacttcggccgcgcagatgtccaggctgcccttcacgtcgataatagcggactctacaacgcctgcaactccacaattctgggcacgctactatcagtgccctcccccgtgccgccggagtacttcatcctcccgtctctggttactgaccacaatatctcgctccatatctactctggcgagtgggacatgatgatcaaccactttggcgcggaactctcgctacaaaatatgacgtggggtggtgctcagggcttcgcgcagaagccggtcaaacctttctttgcggataatgccgcgccgtcggcgaccaagcagctcctgctccaccacacaccggttgctactacattatcgactgcgaccccgactgctgctgctgcgggtacgtggactatggagcgtggtgtttcgtatcacttattccgtggggctggccatagtgtctttgtgaataagccgcgcgagatgttctcctttgtgagggatgtggttgttgctccgagggctggctgattatagggactggcgcatcttgggttctggagttatcaaaattgggttgtgatatgcattttttagaaaactttttattttcaaaattctagggcacttggacttgtaacgagaacagtaatggatgtcgacagaaatgcataagaaaatcgcgagtgatcgtcgccagtcagtgccaaaaaaaaaaaaaaaagggaccataaattcagctgtcgtatttagtaaccaattccaactacactaggatgagcattgggatcaactacaacatacaaggtcagtactacctaactatctgatgcctctagccccaacggacttctcgtccgccaagcttttcagttgcattccaactctatatagcaatccccatagcccttgcatttcccgaattccatcccactaagcagagccttgacagctgtcatatcgcgagagaaacctgagcccagattcacaataacatgagcaagataccattaggataggaacaagaatgaggaaatgacgtgttaagcatgagtacattactccattactccatggctctaggatcgagtcttgagttttatgaacataatggaaatttaatgtgttgtaacttcaaggggttttctgtagtacatttctgatttcagccacaccacttaagtaggccaatttgggaataaattgataaaggactgtaatatagggcctcccttggatgcgacatagcctccgaacaaaccgatacatcaaaacttgagagttcaagctagaatgctatttgaaggggcgttatcttggctactgcgtattactacatacatgttgctttcattcttgtaagtttgagtgttatcatgctgtagaatgccggtggcttttgttcgatctcgtagcgatcttctaatttaacgactcgatggtaattcttctctatagctaattcgaatatacacaaatagccgatatagaagcagctcattactattgtttatattgatcacatgtcaaacaggtccgatgttcgggtgtttgcgtagaaatagaatgcgatatcctctatacggcgatcatccaatttgatactcttagaaaaaatggtatactcgccccttacagagccgcatactctactctatggtattctccttggtcacaacaaggccctatacagctagggtaagctattgggggtatggttgatagtcgtggaagatcaatttgattcaaggacttgctctgaaaaatctggaaatatttaaggagtagcaaatcccgtagtatcccgcggcgaatcagtttacttacgacatcgaatttgtggcaacagaacaacagaagccatgttgcgaaaactgttcacatccgccctcctctttgctgccctgagcaatggacagacggctcctgacctcgggaccgcggagacttttgctgtcctcggtggctcaactgtgacaaatacgggcccaacaacgatcactggtgacctgggagtctcgcctgggactgctatcacgggttccggtcaaattacgatcattggatccgtacaccaagctgatgcagtcgcaagtcaagcacagaccgatctgacaactgcatataacaatgcggctggccagggaccggccactgcaatcgcgacggaactcggcggccagacattgattggtggtgtatatactagcccaacattcgggcttaccggcaccctcacgcttgacgctcaggggaatccggatgcagtttggatcttccaaatgacatccacccttatcactgccacggactccaatgttgttctggccaatggtgccaacccttgcaatgtcttctggcaggtgggaacctcggcaaccttgggaacaaggacagctttcgtcggaaccatcatggcagatcagtctatcacgttgaatactggcgcaacgatcaacggacgggctttggcccgcattggggcagtgacaatggacaccaatactatcaccaatgcggcttgcgtgacaccacccacaacgagcactactgtgtcgcctacgacaacgacgacgacgacgacgtcgactactacgacaaccaccactaccactaccaccactaccacgccgactactacaacgacaaccaccaccacgccaactactactactacgacaactaccaccaccactactacgccgactaccacaacgacaaccactactacgccgactactacaacgacaaccaccaccacgccgactactacgacgacaactaccaccaccactaccacgccgactaccacaacgacaaccactactacgccgacaactacaacgacaactaccaccaccactaccacgccgactactacaacgacaaccaccaccatgccgactaccacaacgacaaccactactacggcgtctaccacgacaactactggcaccaccaccaccaccaccacaacatcatctaccaccacgtcatcgtcatccaccacgacgacaaccacaacaacgggaaccactacaacaggaaccaccacaacggggaccaccacaacggggaccaccacaacggggaccaccacaacggggaccactacaacggggaccactacaacaggaaccactacaacggggacaaccacaacgaaaactaccaaaacgaagactaccaaaacgtggtctaccaccacgccatccagcacaacgctgtgtactaccactcctaccacaactatatgtaccactacggtatggacaaccacgacgctgacgccatgtacaaccccgacgtcgacaacatgttcaacctcgccgtggacaacctggccaacaagcatgcaaaacccccacaaccaaggctgggaagaacacgacagtaaagactacaaccaaggctgggacaattacgacgacaaaaactacgaccaaggctgggataatgacgacagcaaagactacgaccaagactgggaagactacatccaagccaatacccaaggctggacagacgacgacagcgcgtattaagccgacctttgagaagagtcttctgatgggagattagatgggttcagatttataaattttgggcaattgttcaatgggaatcacccaagatgttgtttcatccaagaaaagtaatacgagggataggcgttgttggcgttagtttacgaaatcaaaccggcgccggaacaggaggtaattgcttaatatgtatcgaatactcatgttttaataatatcttagtccacttgctatccttttcaatcaattgtcaacaagagattctggttcctactacctacgtcatgatctacttccccgcaaaatatggggtaaaccaggtgatctattgtatgaccacaaagtatcagcccacctcggtatccatcacttgccttttctcttctcttctcttttctaaacttccctcctcttctttacatctcacacatctcacatctcccaccatgacaaaaggattcgcaaccatcacccccgaatgcgaggaagtattcgacgaggtcaaaggaaccgacaacttaaactacgtcatctactcagcctctgcacacgacaaaaagatcactgtcgcggagtccggcaaatacaaggactacgccgagttcctctctcacttcaaggataacgctcccctatacgccgtcgtagacttcctttacgactctcccgccggtgatggccagcgaagcaagctagtctttatcacatggtatgtatagacaccctggatcacattaccctgatctttacaatcgtcaaagggtacatggtactaactgttgaattgtatgtagggtgcccgaggccgcaagcattcatgacaaatcttactacacgtccaacaaagatcacctcttctacgccctccaggatatcagtctccatgtcctggcacattcacgggtggatttggaccataatgcaagtatgtatacccgcgaagcattgactccatctagtatgattgtactcgaaactgattttttggtttctcacttagtcctggggaagttcaaggctctctagaggggcctttaattttcttctcgaacctggtaaccgctatgtgaagaacgatccacagatcatgcatggtctggctatgctgccctagatacatatttcgtattataatatttcctatcttcaatcgtctacctctaccacctgtactacctgtactacagtaggaaaagcatagaccgaacataggacttttctaaatgacgggataaacgtcttttaatttcggatttattgtaccaaataccaggttcttccccaggatattaaccccgctgatgcataagaaacagaagcaaaaagcgctctaggtgtggtcaatggtcaaaacagagtcaatgacatgcacgatagattgcttgtacctcgattctttcaaaaaatatcaacccgctaaatcatggataaacagaatgcagatcgagaattggactgccagagcagttatagtgtgacaaggaaccacaagagtaacgttgccggcatgcacggtagattgctcatagtcataatcataagacgccagataaatgagcatggaggtagtcatgacacatagagaaattgagttctctgagacggagtgttaaaatttctcatagtcgcttagcgacggaagaacggggcttgattcgacgagagaagcgaatcagcacgttggaagacatcgccgtcgaagaatctgtcactgtatgcactggccggcgtggacgggacagtggcctgcgcagcggggccgagcgctgcactcagcggagtggcaggtacggtgaccgattgagggggcgacatcgtattgagttggaaagaggggttgttggtgagggcggatgttgagacggatgtttgatggtgctgcaggtgtgaggcctgtagcagagggccgtacaaggcactaggaggggggtggcggtccgggtctgtaagataggcccaaggagatacctcgatcaggcggcctgcttcccggcttgccttttggactgggcgtaggaggatgacgacctcggcaggtaaaagctgcatacctctcaactcacgcatctcgttcaccaggtcgacgaaggactgcatgaatgatttgcatagctgccagaactcgcgttggttgcggagtccgccaccaggttctttgattttcatggtcgatagacgctgtcctagggcatctgaaacttccaggcaaaactggcatcgacggatgaggttgttccagaggatttggattccctctgaatcgcgtgagtgttgagcagcttctagacaccttatgaattgccgacgggccaatggaagtgcaccgtatgcggcatgatatgtagcggtcagctgatggaagatcttttcgaatattcgctcctcttcgttttcatccagtccagtcagtgtgttgaaccggggagctccggaagcaggcataggagggaaagtttcgcctgagcgagggatggccagggaatgtggcacagatgtgttgatcatgtttgatctgctgctcgagcgactgcgtgcgtacgacgttgagaaaccaggagagctaatgctagtctgattagaagtcatagtcatggggtactgggggtgtcgaattgtcgtgtcgcttcgcaatcgtcgtgtgggcgggccaggatctcttgttggagtgaccagcgaaagttgagatcggtctgggacagaggggagtgggttacttgggccaaccaagcgtcttgtagcagagccatgtctgttgatggtctggagcggaactttgagaatagcgcaagcattccgtagctccgccaggctgccaaacatcgtcagcatcagcgatcgtacatagcacggatcgccattggaaactatcttggtgacattgttgcgtagctgcgtgccgacgtgaatgtaggcggcgatgcacgtctcgcattcacgtttaaccgtttcggtgaccgatgacattgactctgggtcattgcacaaagtatctgtcgctttctcaagagcatcgttcagatggtcaacgtgtgaggaagcattgtaaaagacaagctcgagactgtgccgtctggtgtcatcatgcttgatcacgttgatcaatgtatcgatgtgggaatgaacttgagcaagggcaaatagaataacttttgcactcttgattatcggttcatcggatccatgttcacccttgtgttcaggtagactggacatccgattaacccaaccatctcgcggacgccgacgctctctcgggctggtgggacttgggggagtattgtcatttgtggctattggcggtgtaggctgacgcggtcgaagcacagatccatgactgagacctcgtagatggctgtttcgatatgggagcgtttcatctaatgtacctaaatcggtattcttgcgactgattagtcccattcttttgctacgagcaacagatgacccttggattatgccctcgctgttgctccggttgcgctcgttaccaggataaggcgctacgccaggtctttggagaccaggcatatgataagtagcgccttgttgtccagaggccatgcgatagtgtgattttaatggaatcggcggtgcccgagatattgatggagagcgagacgagcttgctgagctatcaccagtgctgggaattactggaaaccgaccacttaaattccgctttgaaggtatcggcgttggtgccggtttagcctcaaaagtaccatcactgcgttaacaccgagtgttagcttatatccaccccaggaccgtaagatggacaaaccctgtatcaggaatgatttctggctcgggtgtactcgtctgttgtcgcgttttcataagaaatctcttgagtttggtcgtggccgcaacttctttctcgttgtcggtcatcccggattgtgtcgtctcattttcggtttcttctagaatttcacgtagtggctttcgtagaggattcccgacgcacttgaaaatttgaagcttatgcatctcggagaggccagctgggaggtcgatgaggcggttttgcatgactgacagaactcgcaatgacttcaatttgctgatctcatttggtaactccttgattttatttcggctcaaatcaagaatttcgagtaatggtagtttgtaaacctaccaagcaggattagcgccatgcaagcataaagcaaacttatcattacatactccttttgggaattcgcggaagttgttcgctctgatattgagatagcgtaggtgtgagcactctgcaaagcgataggggatatggaaaagttgattgttcgacagagatagccttcatagtaatcagtatatagtccagaacagtgataccgtatcctaggaacaggcaaaacaagacttgactataaaagttcaaagcaaggctccaacataccgttcgacctcatctttgatcaagtcaacaactggttcagggatcctagcgatgtgtgaatgaccaaggtcaatggtcagcttaggcttgaccacatctgtgacggcctcgctgcctgccagggaacgcttagtatcttgaataccactttcaacagcacgtcgtgctagatcaatggtttcctccgggctaagtgtttttgacccagtcggttgtttgctagtactctccgaggcatctcctaaagcagttccctcgtcaggatacggagagtcatcgcgtgatgacgccagaaagccagactccggtgttccattttccatttcatcttcgtctgtctcgccgcggttcaagcgctgcccacgtattgcgtcctcgggacgagtcatggtgggtgtcatggccgataaaagcccgaatgttgtcaaaaggcacacctcaagccagcaatttcgttgatgaattgataacctgccaagaactagaagaatatccaggtccagcgaccattcctatacagacacacttcgggcacctgcgcaaagcatcgttggttgtgattaagccggaggggcgggctatctcgacgttggacggggaacgtagctcgaggcggccgttagagtggattcggagcggaggaagagagatccgaatggtcaagtgcccaatgggctgggtaccaagtgttcgaacgcagggcagagttgttcaagaccggcgtaaacggtgcaatgaagccctttgacaatcgcgggcgcgataaagagattggccacgatggagatctggcaggtccaagaatgttgttatcgaagcaacaaacgtctcgagaaggctgacacggatagttaaaataaaatcgagtcttggtcctggaatgaaggaaattggggatattcaagttgggcgaggcaggaaatcttctgattgggcaaacaccggacctccgcaactctgcatccagactccgcctgcgtcactatattgaaattgaaatatcaaggatcatatttagggagagtttaggatctacgatgcatgttactagaacgagaagtgaattgaccaagaatgcatgtgctatcgtgtaaatagagctagggaagtacaacatccagagaatagatcaaataatatacataggccatcaataggaaagactagggatccaaaagcccctggaaaaggaggcatagcataatggcgttcgagcccacaccaacatctcagactcttacagagtgaccgtctctccttcttcgacctcggtctcacttgactcaacagtctctcccagatcaggcgcaccgctaagagctgatttccgctggtcctggaccagagatgtttcccgagcccaggcaacccatttgtcgtactgctcactctccatcttcataccaatttccatgtatgacggtccgaactctgcgccatatgctgcggcctcttccgcagccacccgtcgttgaatatcctcctgcaaccgaagtttgtagaattctcgacgagcaatatcgtaagcagtgctcttgttcatatccgggacgttattcaaaagccacagctgtcgctgaacaacactaataccagagaagtaatacattagcattggggggaagtttcacgtaagaaaaatcaagcattataagctaaaatattgggaacacacctttcaccatctaaccgctttcctggctgttggatgcggctccaatcatagtgttcaaagtccttgccagtgctctcaagaagcacacggggccgggcaagttcccagggatgatcgcggaagaattcagttcgcaaatggtcttcctcatatttgagctcgactggctggaaaagtcgactaggctttttgggctttctgcgcttctcttggacttggaagacgacctgcggcttcgacgacccagggaccgttttcaaccgctgctgaacaagctcatgctgaggaggacgtgtacgaatgagggtttcagcaggagggatctcgccgatcacattgacccattgtggcagtttgctggtctttccactggcgaattggttgagtgctgtctgccgcacccggagggctgtgaggtttattttgcccatggcagtcgggcaccgtcggtagctggaagagcttgaaatagaagaagaattgatagcgactggagacagcaaatcaagagacaagatatgcgctgcaggggacgaggtggttgatgcgggtgcgaaaagatgggattggcaaagcgcgtctccgattggtcgagggatgttctccgccagccagaaagtgcaggccgttcatcttcagaaaaacacacctacgtcttccgaatcttgaccctctccccctttgtctgcttttgcgcccagaaagtagacggctctctcttgtcgagtggcaaagggctctctcttggatgcggcgtacctaatgccacgatgtctgtcatctcatgcctcatccacataggtcccccagctcgccaagcctgcgaattcaccccaagcaggccttggatgagcttcctctctttcgacaaacctcaatgcctccctcgaacattcattctcatgcctcctcggtgcggagactctgtccccgtcgtcctcgcccgtccgtcgcgtcaatagcagatatttttgtcggctcgctgattctggcaagcttctgccacgaacactcgccgaatcgtcgggggttgtccacagtagcctggagggcctcagatcataattttcaaaaatttcagagcaaaggcgccactggtcgcagacagctaccaccccgacgacaaccagagtattcaagctcaaggtttcatctgtcgcaacccaaaagaatgatcagcaacggattggcacgtacgaatgacgataatacagaggagtataatattgagaacgaggaggcagagacagacaacgactatataccattgtggccagcaaagaatgcggacgcggaatcgcaaactcgttgtgaaagatttgattttacatatgatttcgaccgcagaatagagataacagaacaaacaaaaaccgacatcgaccccaaattgccggaaaaatacccccgccaatctttcccgtcatggctgcatcccgagaaggagaaacacctctctacctcggaactgtacgaaaggtccttggcagatcatgactgggaggaagcagtgaatgctgtagcgccatattcacgttacaaaaagacgcacagagatgagtcgcgcgatcaaatggaaatccactcggttgagaagcttgtcagaacgttatgggaagagccaaacccatccacccaatacctgtttcggttatacagagatcttcctgcgccgggcgtagctttactctcgaaacgcacccgcggtgctcttttgcgtttgttcgcacatccgcgagatcgacggtgggtagatgctcgtcgctacttggcattggtggacgacatggtaacagcccgacttcctctatcccgctcactctggtcttctgcgatacatctttctgggcgagccaacggcagagtcctgaaacgagatctcattcgagccgtgggcatgtggcagaagatggaacatgtcgctggagtaaaggctgacgaagtggtcttcaacatcctgttcgacattgcgatcaaagccggtgcattcaaagttgctgatcgcctagaggaggaaatgactgaacggggcctgagcttttcacggtgtggaaagacatccaaaatttattattttgggatgattcgggatgttgaaggtattcgagagacttttgacgactttgtgaaatcgggtgagatcgtcgatacagttgttatgaactgtctcattgcctcttttcttcgagctggcgagacccaaactgcggagcagctttacgcgcgcatgctggagaaacaatcaagcaataataagcgcgtttcgcattctcaaccggacgatggaatccactttcacattggcgggtctaatctgagctatgacatgccccaatatcgggaacgagcccgaaatttgggccgcatattgaagaagtcgtcagcactcaaagagaaatttccggaataccaccgtgctctccaagattctctctccattgcccccgacacgcgaactttttatatcttcctacgacactacgcctacaacactggccagcttgatagcttcatggctgtcatgcatgacatggaaaggacctttgctgtcccaccacgtgctataatctatttgttcctctttgaaggtttcgctattcatggtcggaggaagaagcagtggagtgcggaaaaccttcggctgacatggcatgcatatatccgggctctgcgcgactcgaatgcaagactccgtggactgaatttgaacaaccgaaagatgacgtgggagaacccactggctaagagcgtgacagtcgatgtcgaggagctaccagtgactgatgctcccaacgggttgtacatggcgttgccaacagcgaatgcagttgggaattcacagggatccgaggaaactgccgaaaactctactatggatgactctcaagacaatgaacaagactctaagcctgagctggatgaaaaggacgatgaatccacagaaatagaggaacttgatgtagatgaggtcttcaaccctcgcttgcagttctccggcgaggcagagcaagaggaattctgggaccccgagcagcgtctcgagaatggtctttttattggacgtcggatgatcatcactatcctgcaagcattcggaacatgttgtggccccaaagaggttcttgaggtgtggttgcaacttgagcggctttggcatccacagcagcgcaaatcgattgatgtttttgccgtcaaggaagagcttgataaacagatgtccagggatccacatcgggatcgctgaacaagaaagagaggcagctgaaatgtggatattcagcacttgtacattattttccatatagatctgccatataccgtcccgatttctagcgtgtcttttcgcaaatttattgtttgacatgaagaccatgtccatcttgtagaatttacctacctagtttcctacactgtcatcaagtcttggggcaaaaagcctcggggccaaatcgaatccaattgaagtccaatcccaaaagggaatcaaaaagtcaccacgtgacaccgcgttctaggacgcggctaaagactcaatcttcttcttctactgcacttactaccccttttaactaatctatctctgctatgaagcacaatggatcgtaatccggggcttacgcgccaaatttctaatatgcgatgggtcttgaaacataccttcaaaaagaatgatttccggtaagttgatgaactagggcagaggggtcaatttacttattctaccgcatagtccacttcaacgagaggtggtctcctccgtcatcgaaggacatgatgtcttccttcaagcatgcacttcgtttggaaaaagcatgtgttatcagctgcctgcagtgctcaaagattggggttgtgggttttcagcatatcttattttcaataacgaattagcctgacctcgatatctctagtgactgtcgtcgtttgtccacttctttcactaatggtgagtgtggttttggaacgtttgcaatcaaacagctaattcccacagacagatcaggtgaatacattaaaagctcttgatgtaccagtcgctacgatcaattccaatactactcatgaggagagacaacgagtttatgaggacatgctttgcggccacccgagtacacgcctgctttatgtcacgccggagttgtgccagacagacaacttccgccgccgccttcttatagttcacaagcaaggtcagctcatccgcgttgccattgatgaggcccattgcataagtgaatggggccatgacttccggccagcttacaaagagctgggctggttcagaaggaatcttgtcaatccgactgtcccaataactgcattgacagcgacagcaactccccgagttcgctcggacatgatcaacattctaggattggatcttgaaaccctccggctgttcaatactccgtcggaccgtccaaacattcactacgaggtacgatatctcgctgacttcgctggtgacaacgatagcgcagaagacagccagatacaaaacctgctcggatggcttaagggcatccaaacccgacgagaggcccgacttggcagcgaagcaacacggctccccccaatgtcaggaatcgtatatgtagggacccgagctatggctgaacatcttgccaaccggttatcctattcctcggactatatggtcacggcagtggcataccacgccggcgtggaagccagaaagcgcgcgcacattcaatcaacgtggaagtcttctcagccgttccagccagctggagggggaaggacgccggtcttctctattattgtggcaaccaatgctttcggtatgggaatcgataatccagatgtccgctttgtcgtgcattggacaccaccgcgaagctttgaaagctttgttcaagagtcaggacgtgcaggtcgagacggccgagccgccgcctcactcgtctactacggaattcaagagaggaacttcatagagaacatgatctaccgtgatagtgaatctcaccgtgcgcaggcccctgaaaatcgagatgccaagcttgaaagcttcggcaaggtcattcggtactgtgagagtattaggaggtgtagacatgaactgatcaaagagttctttggtgactttgaattagaagaaatgggatcacaactgccggccagggagggtgtgcctgttacgagctcatccccttgcgacttcgcctgcgatttttgcaaagagggtcgtgccgggttggcaaagcgccgggaaaaaatggcatctgagactcagatggctctcctatacgcggatttcgactgaggaaatcatcgtctatttgattgtgctgcgtggtttagggttttatctttttttttttcttgtcgtctggttctgcttgcatttctgaggcgccaacagcatgaagggtgcagggagggagttcttttatacttcccatatagcacagagacaaagacatggatggaatccagcatccgagctgctcggcaattagtgttcgcttctaaagagtttagccacagcaataaatccactgtcaataagcaagccttttattatgaacacaattatggagtttaccgagtttaccgagtatggaaataggtaaatcaaagggttagacacaaggcaactgctagactttctttagcaaagacaaagagatgagaaagagatcggtgaaaatagatcgctagatcaccctcgtttttgcaaacgaccaggacaggcttttgtgtgccatatgcgagatagattgcgcatggacagcggaaggcacaacgggcacaatactaacccactagaacaggttctagcttaaagaccggggggcgggggaacctgtaattcatgtatcagcattcagaactagcatagttgacattcgagcaacgtaccgcgctgtagctgccacctgcaccaggcggaggcggcggggatcccgagccaggaggtggggcaggggtctcgctggccggagcagtaggcggagcactgccatctgcctgctgctgctgttgggcggcggccatctgctgatagtactggcagtaagcgacgtagttctggtatccaccgtagggagcatatgggtcagtggtgccgtagtactgggcgtactgagcactgtagtcagcggcagtgggggtggcagcagcgctcggggaagcagcagcagcagcctggcctgcagggctagcagagggattattatgctgctggcgattgttgtagccaccgccgtagccaccaccaccaccaccttggtagcgatcaccacgatcaccacgatcaccaccgcggtatccaccgtagttgtgctggggtgggttctccttgaaacgttggtactgttcctttacattggttaggagatcctcgcacagctcctttgcctgctggacatcgttggcatcaggaccacttgaaagactgttagtaggagctcataatataagtgagcgaggcagaaacaagcgggaaataaagtcagtaagagaataatgacaactcacgccacatggaggaacatcggttcgtcgctttcacggccagtgctggattcgatgaagccagagccacgacccttgatctggacacggcaacgagtctgctgttggatgtgcttcacataagcaccgccctgtccaacgacctgagcgcgcaagttgaaaccgggaattggctcaagatcgatgagaatgcgctcatccggccatttgcgctgcgtcaaattagccaaatcattatattaacgaagtcgaaaggaacagtcccatacacggccatactcatcccgctcaacctgctgctcgggctcccggcggcggaaacgtcgctcgtcaaccaggttcggaagttccttttgcatcaggtcattaatcatagtgactgctttctccagaccttccttgttggtgctggtcacatgtaggtaaaggggagggctctagaacggagtaatcagcacttgatctcgcgaatcttaggaagacattccttactgctgcagtcgccatgttcttgtcagggtaatagtttcctcgggttgtcacatcttgagggagagaaaaagtgagtgagaccttctttgcctaaagttcaaaatataaaggaagtcgtaccggcgccggtttcatcttgaatctataagtcacgcagcggaggttagcagatgcaatagagggtgaattggaagctatgaagggtaagcttcatccagtccgaaagaagaaagcagaacgatgagaaagcaatgttcggagtaccccaatcttctaggcggaacatgactggaatatcagcaagtgacaaaggggataattaccatcttctgagtagaccccttcgtcagggtgtagcgattgcgcaggtcattgatctcaatgtccttgatgtagtctccatctgcgacatagatttcggcattcaacttcgctgcgccttcggcggagggtgactgggaattctctgtcgcgttgtcggcctgttcgacgatgttaggaggtgggtagaacgaatcgaagtgggtgtatattcacagaacgaattggagggacatcaacgtgttgaatggcctttttcgcctgaagctgcgcattaatcttggctgctgctgccgctatagagaccacaataattagccaaatgatctcatttataacaatatatgaacctagatgtaacgaacctgcggctgcagccggatccacgacaggtggctttgctggagtatctgcgccagggctgcgactcagagtccgactcagcgggcgactcagcgggctacgagtgcgggccgactccgactgtctgttggacggagatcgagagcgttgatcaaaacgggatcgccggggctcaggctcggtttgatcgaagcgagaacgcttgactcgatgttcatcgtccgccatgacgaaagttggggtaaggtgaaaaggaagaggaagtcgggggaaagaagctcaaaggtgcgcgaaggagtttgggaggcgaaagccaagccaccaacaaacaaggccaccaagacaaaattaaggaagttttgagtagctgataagctcagaatactcagaagagctaataatattatatattcttcatttccaaggactgttggtgttttctagcgaggcatgttgaagattgaaggtcacgtggtgggaatcacgtggttttaatcacgtggttttataaccggcagatgtactacaccgctttaagtctagcttactatgagtcagcgggcggtcgccgagatcggccgattcaaaagaatataccccgggcggatctggagtgaatcatcgcacaactcattcacattacttgaactcctcatggctttcaggcgtcctttgacgctgtccctagggtcagcgtcgctgcagtcatctgctacagctgctgcccgatcccgcgttgctgcgcttcctcgattcacctctattcgtgcgtcgtcaagctcaacttcagctcttgcctacaaggcattgcaccgtcggtcacctctgcctttgccggtctccgatgcctcccctcaatgggatgctccgaccgctgtctcctctattctctatgagactcccatgccgccctcaaacccacctaagcggcacatcctgaactgccttgtgcagaatgagcccggtgtgctgtcccgtgtgtctggtatcttggccgcccgcggcttcaacatcgatagtctagttgtgtgcaacaccgaggttgaggatctctcgcgcatgactatcgtgttgcagggccaggatggtgtcgtcgagcaggctcgccgccagcttgatgacctcgtccccgtctgggctgtgttagactacaccgactccgctcttgtgcagcgtgagcttctcctggctaaggtctctatccttggccccgagttcttcgaggagctgctccagcaccaccgcgagatgaccacctcgccagactctccggaccacaagcacgccagccttgaccacaccgcccagcaataccacccccgtcaccttcccccgagtcaggctctgcgtcacaagcatgagcacttggatgccattacccgcctgactcaccagttcggtggtaagatcctggatattagcaccaacaactgcattgtcgaggtgtaagtatattctctatcctgactcaggctttttgataaaaactgactcattcgacctcctacagctctgccaagccttcccgtatcgactctttccttaagctgatcggccccttcggtattctcgagtccacccggaccggtctaatggcccttccccgctctcctttgggtgagcccagcgaggagatcgagaaggaagctgccgacgttgtcgatgccagcaccctgccccctggctaagctatatcaaatttccacctcaaaacatcacatacccgaattggattggattggtctcttggctttgtgtatcttctatttttctggagttgacctaatttcaaaataaatggctcatccattgtatgtaaaatgacaacaaatattgtttctttcgcattttaatattccttgcttttttcctcaactgcaacttgctacttcgacttattcatcaacatcgtattcccatcttgccatcctagaccggagattacaggtgctcccaatagcctttcgggttatcattaagaaatcatttgtagcaatgtaggttaatggcgtttaatcgggggttctatattggttatagtttctacctgcagtctatagtgataccatgtagcacaagcaaatatatataaacgataaacgatacacgaatccatgtgaaagaagtttcatctaactgcttacaactgatcagatttaggattgtcaggaagccttctagcgtgcatgtttacaatataatgtctgttctgcagttcataatgtcacccatgtactacataggcagataatatataaagcctactatatgctacttgtggcaacgacccaaaacatatggtattacacggttggagaataatatgaaaaaagaaaatgtgaaaggagagaggagggtatcccaaataagaagcaggaggaagtgaagaatagcccatgtcttaggacatatctcaagaaaggatgagacggcgctggaacgagcgcgcaagctcagatagatcagatcttacactgatcgcggcaatttacctgaaatttctttttttcactttttttgcctttcttcactgggtgtccagataggacttgcgaggtattacccgctcagccaagtcctacctggacaagaatataggccttggtcttttacttattggaaccataggagtccttggggcttgtatatgcttctatttctacttttattcttggttttacttggtttgcaccttttgatgtaggctgagacaaaaaaacgccgggcattaattcaatcgagcaaattccctatgcatcaatcatccaaatattataggcacatgggcattgccgatccagcagcaataatcacaaaacaagaccaagcaagaccttcattatacaggtcgcggcagctttacatcatcaacacaacactctcgcggcctagaacctcactctagccgaaattccttttccatgatagaaaatgatatccatgtagttgccaatcagcactccgaccttagcgacagcatccatctccaacgactgaccaagggccttgcgcagggcgtcataaccaaccccacccatatcaagatcaactggcaagcgtgggctcttggagataccaggaggcaccgcaaagggatcacggttattaatccggccgattggctcattttcctcatagaaagccgttgcgtcgattgaggtgattagaacattgctctccgttagaggtgaggaaagggtgaattctgccgtggaggaccagagatagaactatatttatgagtaaataagtgttagtagcaagtttctcctctctggatagggacatggtatgagtagaaggggcatgtaccgttgcatcttggataaaatgaggcttgttgtcatcatcatcgctgcctggggaacccggaatagatatgcgagggataggaacagtgatgttgaggactgataatgcttcgcccaggtttggtagagatggaatcgtgtttcgatagctcttgatggtgattgttgtattcaagcctgagtgaaaaaaaccatcagcataatttaccattttcatacctagaaggacctgacctgatacataggatgaaagcagcgcccgccctgcctcaacgccatctgctccagcttcgtccaacggacaccaaaagaagtcgacgggcacataactgttgttaccaggcccaacagagatattatgagcggtgaggtgggctacaacagtgtcattgtagagtacaagaaggtcaacgaaggggactgtagccgagtaattcgttggatcagtaaagttcgcctgcgcagacaccaacatcgaaaattcagtcgtgtctcctagttgtaatgagacgatgcgtggattgaggtggtcaagtgagttgccgatggaagctatgacatggtcaatggccaaaatattcttgatttgtactaagatcttctaattcatgagaacatactcttcacgggtacctccccttccgcaggaatccctcgcaaggcgaagcggcccaaaccagttgagacctttgtgtctacgctggcagcaacccggagcacgactgtttcgctaccgaacagcattgcttggatgacttctgccaaaagttcatcatctgtgacttctaatggtgcatccttgattgcaaactccacaaggagtgcagaggagccatcttgatcattcaccaatgtggagttggcgtcttgccagtggctgatattcaacacaccgaacttctcttccttgtagtagacatctgcaagggcacgaacttgcgggacttcgatttggaaattcatctcctctggcagagcaataagaaccttcactagagcagacactgtgggttgtgagtctggagaatctggctctgcgaaagggttaggaagggagaaatgtgtatcggacatcgtgaagttcttcacgaggttgtccagcgcatgtcccgtaaatggaagaggcatagtcacgctgcgcagtagattgacaatccaagccggggtactgagtgatggtgcatcagacccacggatgtagatagttgtttcgagaccttgcataaagctcgaaactaaaagatccagaggagaaccctcccgtcctgggcaggtagaggtcaattcatcgggtaatcgttggatgaaaccatcaacgccgactgcggtcatctggccaggctgaacgtctatcgtacttgtcttcgcctcggcaaccagaatataaggatccccgggtgaacagttcggcacaagaatatcaaatccgagggcaggaacagtgagagcgacaggagaatcaatcgaagatgaaagtaagacatccactgccatgccaccactgcttgcatcacgcgcattcagcttgagaatattgatccttggcagaacagggaaatcatgttctgggaagggtcagcttatattgtccagtagtaaaaagaaaaacaaatacactataccttcaatgatgatattgtgtgttaggacttgagttcccaaagcgaacaagcctgacttgagatgcattgtcgccttgcccttaacactaaggcggcccaatcttccctcaatccaatcaagagctatcgcgtggattcctcgaatgtcacccgcctctagatcggtgaggaagtcaacattggtatgacggccgttgcggatgtccactttgatggagggcaatgctgcgtttccaacaagcacattcccatattctgggagataaacttcgacatttgatggacccgtctcaacttccctggctatccatgtcgccagtcgaccaatgcctcgaaccgacttattcttcacgcggcccgagtccatcataaagtcgccctgaatccgggctcgaacgccgtcagatgttgtagaatcgattgatactgcggtcggtttgaagacagcggcttcttgcgcatattctttgacggctgcgggagcagcaaaggcaaataccagtatcgtcaaaacactgattgttagaatagagagagagatgaccgtcggccatggtacacggccccgcttcttgacggcgccaccctcgggcgggttctgtgatgcgaatgacggggatcgcagcgatccttgttcggtcccgtataccaattcatcagcatcacggcggtgcaatagaggtgttgattctgatgataattcatatgatggcctaggctcgtcgacggatgttcgctccgaaggccgtgtaatagggctggactgctcctccaacagacgtgggttcgaatctgccatggtggcctcgtctgaatgagatggtgatatttgcgaaatatgggatgactctgttgataattgatatgatggcctgggctgatcgtcggagcccaactgcttagctggcagaggccggtttgcctcgtcagccatcgtggccctaaacgtatagataaatcacaatgaattgtagtatccggagccaatatcagctatatgaaatggatgaatccagaaccacgtaacagaaagaagagagaggcaagatataaccttggaagaggccctcgatgacgataagccgatgataacggaaccttgggatgcccaggtgtggagagctgacaccttgacacctgacatatcgggccgcaaggcatcaatcccctcgcacatccactctctattaatttattgagtcatggttcttcacttttagggctcccccgttcctattcccttcccacgttccaactcctcatcaataacgcccagctcatcatggctagtggtctcacagctgccgcccgttatggtgcccaaagtgtaaaccaattggccggctccacctcatctttgcgtcgaacactccaggctaatggaatccgacgatttgcccaccagacaccgactttacctcccacctctcctttcgcccctcgtcatcttctctccattgcagacctgacccctacggaattcgcgaccctggtccgcaatgctgcgtcgcacaagcgtgctatcaagtccggggccattcccgaaagcctattgggatctctctccggcaagaccgtggccatgatgttcaacaagcgcagtactcgcactcgtgtatccaccgaagccgccgccgtccagatgggtggccaccccatgttcctcggaaaggatgacatccagcttggtgtcaacgagtcgctatacgatacctccgttgtgatttcctccatggtctcgtgcattgtcgcacgtgtcgccaagcacgaggacgtcgcaggtctggcacaacactccaccgtacctgtgattaatgcactttgcgactccttccaccctctccagatcatcgccgacttcttgaccatccacgagaacttcccggcccacgcgcacaagctctccggcctgggcctggagggtcttaagatcgcttgggttggtgatgcgaacaacgttctgttcgatctggccattggtgctactaagatgggtgtggacgtggctgttgctactcctaagggctacgagatccctgcgcatatgattgacatcatccagcgcgctggtgagggagttgacaaggctggcaagctcactcagaccaatgtccccgaggaagccgtcaagaacgccgacatcctggttacggatacctgggtctccatgggccaggaggaggagtctaagaagcgcatgagggcctttgagggcttccagatcactgctgatttggctaagcgcggtggcgctaaggagggctggaagttcatgcactgcctaccccgtcaccccgaggaagtggatgatgaggtcttctacggcccgcgctctctggtcttccctgaagccgaaaatcggctgtgggcggctattgccgccttggaaggctttgttgtaaacaagggaaaaattgtggagtaaaagccggttaattatggagtccattcaaacatgccgagaagctttacccggccaatgacagacatgatgatttgatatagcggagttgccgatgccgagggttctctgttgccgccgagccaatcaaaagatgatccgacggcctggggatttcggatatggctcctccaaaatagcgggggcttccgattctgagacctgactctattctgttcttcgcagatcatccggaattgactattgtataatatcctacggagtactttgctactagttgccagcgatctgaaatttacagggctatatcaagacattccacctcgggggttgattcatagtactgaatccggcatcactgtaagtgatataaagcagaataccaacggttgaaagcccccaaagctgtatatttccaaaccgattcttgagatttggtaaatacccctggagggtatggactccacatggaactcgggagacctgaagtggaatctcggaatcgttgctcaccccacatttactccacgctccgaagagcatctccaagacgtttgatcgggtaatgcttcgcaggggaagacacattaagcttgcttaagaacctgagtatcgcttatcattcattcctcgaataatacctctgttttcagtacccccaaatttcttccacatctcattatcaacatctcccccacatcacaatgggcttcgaagacaagcgagtcgcaatcgtcggcggcggcctagggggcatgtcctttctcaatgccgcactgtacagcggtctgaagaacgtgcagctatacgagcaagctgcacagttcggtgaggtcggtgccggcgtaaatattacctcgaacgcaaaccgcgttctggatgccttcggtctgcaagagagtatgatgcggaagtcctcccgcaagctgcctagctacatggaataccacaactacaagactggggagtacataggtcacattgctgaattctcgcagccccacgcgcgcctgctacaccgcgcccacctactggactcgctgaaggagcgcgtgcccgagtccagcctgaatctgggtaagcacctggtatccgtcgaccgcaacactgccgccggtgctgcaccgtatacccttcgtttccaggatgacagcaccgccgaggctgatattgtcatcggctgtgatggtatcaagtctaatgtgcgccgggatatgggcctaggagacgaccccaactactctggccaggtggtctatcgtggattcgtcgactacaaggacctacccactgagacggcacagctactgcgcaagactattaacttccgtggacccaagcgccatgtcctgatcttgcctattggtaaccaggagacggggaccgaccgtgctgccatcatcgggtttatgtccgagccgcttgatgcatgggattctgagagctggatgtcccgctcggatattgatagtctccaggagcatgtccgtgactggtgcccagaggtgcagcacatcatcgctggtctgcgcaagagctccgaggacggcaagatgctcaaacaggcgctgtacgtgcgtgacccgatcgaaaaatggtatgagatgaagagtgggcagaaagatgctggtattatcctgcttggtgactcggcgcactcgacccttcctcatcaaggtacgttgcatcctatctgtgtctagtcttattgcggggcatgtattaatagtactcgataggtcaaggaacatgcatggcaatcgaatccggcattgcccttgcaacaattctcagacactggaagacagacgacctagagactgcattcaagttctaccaggacctgcgcaagccccggacagaccgggtcacaaagacaagctacgaagccggcaagttggctagctcagactcccccgaccagatgtccaacaacttcaacccggatgcattgacggagcgcatgaagtggattatggagtacaatgttctagaagacttgaagatcaagggtcagggatatttggacttgcaggattcgcgcctgtaggcggtactgatatatgtcgacatactcctgtgtatgctttttttattttgtagaaacaaataaacctctctgaattttcctacttctgttcgactgcaccaaatgagcattcatcatgccacagttgttaatcgtatgatttgactacacaactcgcaatgttggacgatttctatagatccgtcatacatcggtcattccatctcactcggcttatttacattcaacaccattccaataatatatctcaagatcctatctcttgataacatttctatcctcgggcataataacttcaagacaattgccggggccgaccatcttcacatgtcagccgcacgtgcagcaactccgcatctccatcgtctcgacctcttcacatctgattctgattgtgcttgagctttcgactggaaaacccatgatggaggtaaatactatattctgacctgcacaaaatttgaagtggatatctaacggggcatatatagttcaccactaactcgggaggcttccagtcccgtcgatcatacccatccctccgccatatctctatagcacccttaaccccacgattccctattgatgacgacacagacctaacagactacttcaaccactccgaccatgaaactccagccagcggcagccgcacacccccagcatcatcctatatatctagcgtctcagtcccaagcacgccaccgatcctctcccactcacgcagcaactcgcgaaaccgtcacacgcgcagcaaaagctccacagggagagtagccttaagcgacacgaacctacacagtcgggacctaggctacgccctccaccacattccaaacacgcacaaaaaacagcccagcatctcatactcgcaaggacgacgtcccctcccagacaacacgccgaaccccaaatccgacgcagaatggatactgcgcgccggcattgccctggcctcctcgacccgcgaggaaaaaggccaaagctggctctccaagcgcgagtcctctacaagcctcgtcccagacacggccttggacgaaatactcactaaacgccaccaccaccgcaccaaatcaggcgcctcgtcacacatttcacgctccggcgcctcaaccccaggcggagccggtgctttctcccggcgtacctcccgctcccgcgccggcagcagacccggcagcaacagagtccatctaaccatgaccaccatcccggctacctccccgaccacagcagagaaggaagtgtccttcagctcgggcacgaataccggcacggcgagccccgaagcgcgcggccgtatgcctgccctagttcctgacttcgtggacgcgcgaatccgtgcggagatggcatcgctacggcactgcgagcggtcatacccggacgaagactctgtgtactgggatggggcgggctccgaattcgactcggctttgtcagagtactcgttcgactccgacgagatgccggatgacttcgatgaggcggatctgcagcggctgacgcgcgagcgcgggttcgggctcggcacttggattgaccggttggtcgagtggacgcttttcggggttgatgagtggcctgcggctggtccggctgtggaggctgcttcgcgcattggttcggcggatactactactactgttacattcgaggagcctgttttgatggctgggcgggatgatgatacgatttcgctttgttcggttcgggatgcggatttatcggatgatggggagggttctattggcagtgctgcttctattgagaagcctgggagtcagggggggtgggaggatgctgcgtggttgattcgtttgatgaagagggctttggtataaaatgtgaattgcattgagcgatgttcttgattgggatggttgtctatccataatgtttcgttttgtttagcttgctctttgtaattggttattagctttgttgttcagaatatctatgaagctggctacacatgaccaagcaaaagccctaagatactagagaaatgtcccggttttacatctttctactgatgaacaaaggctccgagaaaattgataggattccaatgaacaagctagcgtgaataaaggccactaaccaacaacatatttagaatcctgcgcgaacaacaggaccagaatgtaagttgcagaatgagttggatggcgagtggcccttttctaatgtatagaataggttcaaatctccgccgacttttccaaagcttaaaagcgcaagaattggagttaatggcccaagacagaagttgccgctctgacacgcatcattggaatatgcgatggacataatggcacaagcaatagagattgagtcaaagccccaaaagtgaaacagacaaagacaacccacaacagcgaaggagaagcaaaagacaaacaatgagacatgaatgaaatgaaaaaaagagaaatgtatgcgacaccagggcgccagtacagatagaaagagagtaacagagttggaatgagtacacaggtggaataattcgagaatccgacagaaaggaaagggggaaggaagggtcttgcgtatacataggaatacgacaagttggcaaagtaagcaagaaagaaatataccgaggcccagttcgttcattaaaagatttgagaacaaacaagctaccacagcattcatcttccaaagtcccagccgaaaaagaagaacaaagaaaatgctgttaggttatccgccttgagtactataacgccatcggaccaggagtctagggtcatgcagcaggtatcgtgatcgtgacatacgtcgaaaattgcgcggtcaaaggggtatggaccgtcggtcaagctcaaatgagagccggcatgaatggggggacgtgaggccgacacgtaagagcggtgtaaatgtaatggtggtctttcgtaaggaaatcggagtggtgtgattcatcaccaaggtccgaccttgactggtgttcccagcccgtaagttccggaaaagagctgatcccgtatagagcccatgtcgccgttggttccgtgggatggtgtgtcaggtccattcatccatcccaagctgagaccgagttcgttgacagctccctgtagctttcctccagaggtttggttgtgcttggccaacttttgatcccaacctccatattgcaattggatgccaccacctctttttgccgcttcccggatgaccaaaatccatgccttgcacatctcgtcataagctgagtctcgttcaatgttgttctgtggcgtgctccagcgaggcaaggcatgaatgatgtcagttgccccatctaggtagctcagggatgtggatgcttgtgattcgtttgggggaaggaagttaggtgtgaagtcactcaaggcgtcaagaaggttggtgagcggctgtcggactcgattgtatgcgtagtccgattcggtgttgccacccaacgggaatgacgactggagggcggcctgatagttccgaaggacttggagagttgaggatacattcggacgtggggatgtgtgcacaacctcatcgacgagttgagggtgacgctcgcacatggtccgtacaacagtccgcaaggcatctgtatcgagggtctctagcagacggggcagagatagaggtcggcctgaaacgttcggtcgggaacgtttgatgttacggtagctgtgaggtagttgtcgaggagtggcggcgggagagtttgtaggcgaagcagacatgcgtccatcatgatcattgtcgtcgtcggctttccgtttacgactggcatacgacgaagagggtgtagacactggccgttctgtcagtacacgaatgcatcaaagaagaaccacctctaaaccggacagagaaaacaaatcattccaaggggaagggatatcttactcatacgggaaggagagaatcgggagttctcgtagaagtgaggaggaacaggaggtgtggccaccaagctgttcatggtgacagccagatggcaaagaataaatgagacggtccaaaggactcggatatccaaaggagtgaaaaagaaacagcaataggcaaccttgaagaagaagaggatatgtaatgggttttgaggtggggagagaagggcagagaaaggtagcggtggagaaaaagtaggccgttgcaggtggcaacgcactccctttgcgcagcttttggagatctgtgcccttgaaagagatttgacgtggactggagaagggcttcgtatatttttgaatgattcttataagaaactaaatgtcttatatcgttctctttgctgtcatcggatgtccactgttttcgggtgctatacgaatacccgcatcatctacatctacgttatacgtaatagaaaaagactaaaaagaaaattgtgggtaatcctattctttggactccagcggtcataaaagggatatcgtttctacaagtacagggactgggcagcaacaatgtcacggcggaccttgcccagggcctcctcgaacttgctctccaggtcctcgctgcccatcaccttggcagcttgcgccatctgccgtaaacactcttccaatcgacggaagacacggatcaagctaccctcataaacatcggtcattttactaggatagttagtatactgctaaaataattgaaagagggggatgcttaccagatatctgcgaaagacttgccctgagtccactcgtagaccacctccatcagctcccagtggaagctctgaacgtactcatcctcgttcacggccatcttagactcctgcgacaccttggcaatgatgcgggcctgtgattggatctccttcagtggcttcgccaactcatcgttgttcatagtaggggcgtccttgaccttttcttcgaacacgaaacaactcatgacggaagcgacttgctcagcagtcaagttgttaaagaaaccattgaacagcaactcgctcagcatcagttcgtcacctgtactaatctcacatgcaacacgagcctttaactgcacgacttcggcttcgttgataaatccaaaacgacggagcacacgcttgcgattcttcagctcatcaagctgcaaaaccgacatggcctctgtaatttccttctttatcgccttcatctttgcagtcagttccacctttgcggcatattgctcgtataattcagtcaaccgaggcgaattgtgcaaaggattactcagaaggcgagactcaagaacctcgattttctgtcatatggttagcaacgtgaatcatgtcttagagcaacaaaatcccctcttacccgcagtagcttcttgaagctttcatccttgatctgcatattctcaatcggatcaagcagcggaataccatctgggaaccgcctcttaacttcatcaatagatttcataacatcattccgagagccaggcgacgtgatatcattgggaagcatgacgcgaatgtgagaaatttccttgatgcagctcagcacaattggcactacctcactgcgagagggttccccttcctttggagggtgaacacccggcggaagatcttggaaagacttggtcccaatggatgacccttccgttattctcaccaagacatcaacgatgtaagattggtgaggactcaatttctcgctgtcattgttcgcttgcttccgcttcttctggttgatcaccacgccccagccgaaatcagcatccttgtactttacatggatcaatcgtccagggtgaatgaaattcaaagaataattggggtgggtaatgacatgctgaacatcgtcggcaaatgcatccagttgtttccgtaggtcgtagtattcgcggatggtcccctcgtctgagatgatcatattggcgcgcttctcctcgagactatgaagctccttctccatacctgaaacacttccagtattctggaactgcttgaagcatcgttcaagcatgtattcgggcgagataccctccacacgcatcaaattgagaatcatgttgtagccaagatggaatgcggaattgagtcgatcctgttcaccacgcacgatctccttggcgactgctgggtccatctcctctccgaccatcatgatcacaatacctcggtcatcgagacctcgacgaccagcccgaccagacatctgaatgaattcagatggggtaacccagcgttggctagttccgtcgaatttgcggacactggtgaagactacagtctttgcaggcatgttgagaccaatggagaaagtctcggttgcaaacaggactttgatgagaccctcctggaacagaatctcaatggtttccttaagaattggcagcaatcctgagtgatggacaccaataccctgttgcaaaagtggaaggatattttggatctgtggcaattgacgatcctctggagacaacatctcgatggcgctttcgaagactttggacaccatatttttttcggaatcatcgttgaaagttagtttgctcatctgtaaagcacctgcttcacactcccgcttgctgaagctgaagacaatgacggggttgtagttcttgagcatgatcatcctgacgatcttgaagatatcagatgggcccttgtttccacccttgttgatttgcttatccttgcccctgcccttgcgtttggctaaagcgtcagccgggtcatctcctttcttgtccgaaatcgcgctcattgctttctggaaattctcctcgcggaaaactcccttttcatccacgatgagatggataccctctccaccagcggggaagaagtaattctggagtggagtcggacgatagttggtgtacacaacgtgacagggctggttatgcatcttcacgatccattcggcaaattgcatggcattcgggatggtggcggacaggaaaacatagcggactttatcgggtaacaaaatgatagtctcttcccaaacaacaccacgattcaggtctcgcatgtagtgaatttcatcaaaaattacccactgaacttcacgcataatctcagaaccacggtacaacatggagcgaagaatctctgtggtcataacaagacatgtggcagtggggttgatggtcacatcaccggtcatcagaccgacatcgccgaactccgcagcgaattcacggtacttctgattgctgagcgccttgatgggactggtgtagataactcgctggttttgtttcaaactttgcgcaatcgcatattctgccaccacggtctttccagcactggtatgagctgataccagcacactctcctcccgctggattgaagaaactgcgacctgctggaaaggatcgagtgtgaagggccatgtctttgcggggttcgccggaggcttatgctgagaaataggcacataagggtagtttggcgggattgcgacttgatggcgcacttgatgagacaccacaagagaagaagtgcctgcagcacctgaaagtcctgcagaggctgtgatttcgcgctcttgctcggtttcgaaagaatcggcgacgattggctcgggttcctgatccaatcgaggtcgcttcgtctcaggttgctctagttcggacggggtcgcagggggctcggcttctgctgagtcaatttccgcagcaggtgcatcggacatcgcaacatcctctttctgttcaggctcggcatctgcagttttcttcacagctccattcacctgtctttttttgttcttatctttcttcaagcgcttgggggcatcctctgacggttttaccgcctgaggttggtcctcaaagacatcaaagagctcatccatctccagcggttgggattggtgaatcaaccacaggaggagaatgagcggcgtaggtaaccggcctggactttttctggttgagaaatttaaaagttccatccatatggggcaagcggtgggggcgatcccgagcaaaagacgctaaacccgattgaatgaagtcaaatcacgtgattagcgatcatcccattccgcacctcgagatgttcccttcggcttcgtccgtacctttccgatcgtctaccctctcctctctgtaactcaaggttagtaccccccaccggaaatacaaccattcctctcgccgacgcttgaatttcagatgtactcctccgctatccgggccagaatggccacctccttcgctgcccgtcgtggcttctccaccactcgcacccagcttgctagcccctaccactacgccgagggtcctcgctccaacatccccttcaacccgctcaccaagtacttcttcttgcgctactggagcttcatgagttagtggtccccaacttacatatgcgcagtgccatgactaactcggacatcatctagttgccggattcggtgctcccttcgccattgccggtgagctataccccctctctacgattctaagccttaagcatactctaacatctctttctactagtctggcaaacctacaagaccaaataaattgccctttgcactgtacttttcttgcgatagcagtctgggcaactaggtggttgaaatcttggatcggggttgaagcagaggcggataccatgtacaaagctagagattattacggaaaattggttccgcctgttaccgaccccattgtaattgtgtagatgtcgaaatgtgtagcttaaaaggacgttgaaatatggatgaagtcattggctgagccgctgtggaaaaccaaaaaaatctcttggtcggcgcgattcatatatcagtactcacgaacacaaccactcgcaaacaacgtgacagttactgtcaacgaagaagaaagctggtctctgaaacttaactttcctcgctattgtttaaattccatacatttactcccttgatcgcttcatggcggggtaaaaaaagaagcataaaaaacttacccgttcctggaagatgcgcaatttaagaagtatccgtctcgctgagacggaaattgagagcgaactgcctctcacagctacagcatgggatactgcttcagactcggtggtgtgcacctttggtccggccgagaacaatgcaatcattgaggttagacgaaaacgccccgagatcacttcaacagatccactgtctcccgaggcttttgagtgtattgcttcctgggatgctccgtgcccgctgccggacctggcatgtgatcgtgtactcgccctgcattactttgcggataacctgacaacctgtctggtgttggaaggaggtgatattatcgttgttcgcgaagagccacttgccggcgaagacaagattgaaatcgtcggctcagtcgatgtgggaatcacggctgcagcatggtcaccagatgaggaaatgctggctctcaccaccagagcccagacgttcttgtatatgaccagagactttgagaatgtggccgatattactttcgcccacagtgacctgcaatcatcacagcatgtgtcagtgggatggggtaaaaaagaaactcagtttcaaggaaagagagccaaagctcttcgagacccaactgtaccggaaaagatcgaccaaggaattttgagtagtcaagatgatggtagcactacaatcagctggcgaggggatggggcgtatgttgctgtgaacagcatcgaagcagatactcgccgtgtgatcagggtgtactcgagagagggcactttggagagtgtgagcgaacctgttgacggtttggaaggcgcattgagctggcggccatctggcagcttgattgctggaattcaacgactcgaaaatcgggtcgatgtggtgttcttcgagaaaaacggactccgccacggcgagttctctcttcgtctgtccgatgaggagatgaaatcatgggcttctcgcatccacctttcttggaatgttgattctactgtacttgctgtcaagttccaggaccgtgtacagttctggacaacgggcaactaccattggtatttgaagcaagagatccctatcactgttgatacaaattcttcgcttccatattctttcgaatggcatcaagagaagacattgcgattggtcgctggctcctcaggtatgctatccttgcatgaagaacagagcaagaataaaagctgatctaaacagtctcgatactggacgcggattatgtgtttgatatcaaccatggatctacctccattccggatgatgttggcgctgttgcagtcatcgacgggagtaagtatccagtcagacctgatttgaaacattactgattcacctattagaaactctcaaattgaccccgttgcgaatggctggagtaccgcctcccatggctcacaacgagctgactttagagtccaaagccattgatgttgcattcagtaaatccggatcccgtattgctgtcctgacgagcaacacactctccgtttatctctggtctctgaagagccgacccgttcctgttcctatcctcgagtcaagctacccgttatcagatgccccagccagtcgaccccggcagattgcattcttgaatgagaatgaggtatatgttctcagggacaatggaccgaactcaagccatatcgagaggacgatgctagacacccgaaccaccgagtctgtatatcaggctgtagactccgagcaactggcatcgatcttcgccggtattggacaccaagctctgtggttctcacatgcccgccaaccagcccatcctgtcagctattcgagtgttgaagaatcttcatcgggaaatcttgatattgcttcatggggtgagagccccaatgttgacagccattgggcccgtgttgtctctatctctgagcatgaggtaagtctatattcgctttttatttggagctttgtgctgatttcgatagcgcgttttgattgcaatgacgagaactggcaccttgtatgctaacaagcgagtccttgcgaggaactgcacgtccttcctcgtgaccccatctcatcttctattcaccacatcggcacatcttctgaagtttgttcatttgaaccacgttgacggtaagattgatttcttggacgtctaagtcttcataagctaacatagggattgcagaaatggaagttcccgaggatacaccagaaaccgatgaacggtgcagaagtattgaacgtggctctcggttggtttcggtgataccgtcgattttcgcagtcgtacttcaagctcctcgagggaacattgagaccatcttccctcgcgctctagtattggctggaatccgtaccttcattgaccagaagaaataccggtctgccttccttgcatgtcgcagtcaaatggtggatctaaacattctccatgattacgctcctgaacaattcatggaaaacatcactctgtttattgatcaagtcaagaagattgagttcattgatgatttcctatcacgcctgtcgtacgtcaatatccagtcttataagaaactattttactaacgttcacatagggaggacgatgtgtcacagacactgtacaaagacacgctgaaaatatccaagaacgtatcggcagctgtcgcccagccggatggaccagcagttccctcggtgcccaaaaatggcaaaaaggagagcaaaatcaacaaaatatgtggtgcattcctagccgctctccaaaaccgtgtagataccaatttgcagaatctgatcacggcgcatgtttgcaaatcaccgcctgacatggaggcaggactgggacttgctgcaggactaagaagtaagtactcggttctttgtccttctcgataatcaagaactaaccatatcacagtacaacatcccgagcaagctgaagatgctattgcgcacatgtgtttcttaaccgatgctcaccggctttactctcacgcattgggtgtatatgatcttgagcttacattgttggttgctcaacaagctcagatggtaagactttcggatgaagtcattggctgtgttattactcaacactaacgaattctcaggatcctcgcgaatacctaccattccttcgtaagctacagcagctcccagagactcgaaggaaatttgagatcgacaatcacctttctcgcttcgaaaaggctttggtgcatttgtatgctctcaatgctcacgatgagatcagcgcatatgtcgtcaagcatgtgttgtataaggaagcccttgagctctacaagtaccaagcagagcaacaacgggaaatcaccgagctctatgccgattatctacaaagtcaatcgaagtacaaagacgcagcagttggtcagtggtttaatcagcgcgacaaaatgacagctagctaattttcaaccccagcgtacgagtctctcgagctttatgaaagtgcttacaagtgcttcaatctggcgcacaaatggcgcgagtcattgtactgcgccatgatggcatctctatccgaggaagatctagctgctcacatcgacggtctggtcacaaccctagttgacgaaaacaaggactacgtcgcggcagcaacaatctacgccgaccatttgcatgacatcgtgacagccgcacgacttctctgcaggggatcgaagttcgccgacgcagcacgtctccttacactacacggtaaacagagcatggttgtcgaaatcgttgactctggcctcgcggaagcaatgggcaacatgaccgacctgcttgccgactgcagatctcagctcaatgcccaggtcccacgactcaacgaactccgtcagcttcgcgctgccgacccgcttgctttctacggtggtgaccccaccggtggagaggcgggcgtcgatatccctgacaacgtctcgctggccccgacagatgcatctacgcttgccggtcgctccatgttcacgcgttacacgggtaacaccgggaaaacaggcaaaactggaatgacacgtcatacctcgaagacccgccggcgcgaggaacgcaagcgtgctcgtggtaagaagggcaccgtttatgaagaggaatatcttgtcaacagtattcgacgactcattgaacgggttaactcgagcgtagcagaagctgagatccttgtcgatgccctgctgcgtcgtggcatgcgtgagcgtgcagctgctgtcgagaaggcattgcaggaagtcttggctatgtgcgcggattgccgggacgaggtatttgaagtccctgcccccaatacagcgaacgaggaccaggaggatgaggataatgatgtcgagcccatcaaccctcctgtttacggaggaggtgccagtgttttgagagaaagtatagccattgttgaggatggcggtgccgctcgcgtcaaggagatccctatcgtcaaagaaatgaagaagtcttctttgctagcttgaagcagttgatgaatatactgcgtgagcctagcatctagattatgaaatgaaaaataaaaatgaaaagttgcttcgattccaataattcgccctacaattatgtatcttgatctacatgttacacttgtatgacttgctagcaactttctacaagatatctcaagagtccctaggctatgtcctgtgagtctacgagacccccataacacaaatagaatacccctccacagcagcctattctcattagaactgggtccgaacattgccttttcacggtgggcgatattgagtcttaatattcactgtgaacattctttcacagcaaattgagcgtggtatacttgaagctatggtcattctagttttgcttttgctttatcaaggtgactgggatattagaagtgaagtatatatctcttggtatgaaaatattttgatctcgagcgtcgaagctatctatacacaggtcatcagcacaaatactcaaaaggttaagtgcaagtctatgttgcacaagtggactatgatcattcacatagtaatatcctgaagcaatcaagccatacactatatcccgttaaggtaaagtagtacaatagacacagctatctcactggatgacacaaaactgacacatatatgttgtgcttctgtgcgttcaaagtatccaggatataaaaaaatgattgtatccctcgtctgaatactaggactgcagccaagaaaggattccaccctaggcaaggcttttcctttccaagaaccgtaagtgaacatttcaaattatctattagctgatattaacctcttaatgtcttgatctagattatgcacctctccatctcagcatatctcactttcctcgtgggcctcagcacgctagcgacggcccaagtggcagccccagcccggtctatcaaatgcgtttgcaacggtatcatcgagaatactcagtctgcctgtgttgagactggtggaagcttcaatgctacagcctgcggctttccgggttgctgtgtttatgccaacgaacaaactacgttcattgagaattgtaggacacttggatatggttttaaacgctgtgatgattgtcgttcttgttgagaatacgggggagatatacgccgggggaaggatagtaagacggacattggacgtataaagttggaagcgaacattccattgatttgcattccagtattgtgtcatgtcgtcatgtgcaatatatattattatggaggaatggaaccagacgtgttgcttcagtataaaccgagaacccactgccatggtattattatgttcgatatcacgagggagaaaataagatatggtgaacggaatatctgcgtcaagcttgcatggccaacttgaagtgcccgcacaagaacctggggtatctttcaagctgacagaccttccactgttagccagaatgagaataccggttgcccggtgtagcttattcaaattttctaaagagtgctgaggatctcgccagtctcgctgacaaggtggtcttcaaccttgacagggccctctccgacgccagtcaagatgacacggctcacaccatccttcagaacttcgacggcgcgagagtcaatctgatccaaggaaacaccagcagtgacattggctagtctctcgtagaatacgccgtcccacccttcagtgttagggcccagaatagccttgacggtgccagccacaacttcagagtccttatcttcatagtagatgacagcatttgggccagcatcgaaagtgtaggcacaaaccgtccggccaacaacacggttgatgtcgtgcacaaggcgaacggcagcacgagatacgtcgttcatgtagaagatagggggccacgagtcgaggcaagtggcgtggaaagtgttcgagtctcgcatggtaatctccgcaaactcgtggaagttgcgggtttgaatagcggtctcaatggcatccatacgcttgggaacaacgttcagtacacgctcagcgaaaagggccgaggtggccacagtggtctgcattccctcggtgctgggcacatccttcttctcggcactgacgaccagaacaagagcccgcatctcaggccagtgggttgccggagcaacttcctcagccaggctgtcgcttccatcggcaagctcacccgtgcgccatgcgacatacccacccatcagagagcggcaagcagacccggagccttggcgcgcaatgcggctcagctcctgaggcgactggggcagttcgtaaaggtcagcgacggcgcggaccaacgctgcgaagccagccgcagagctggccagaccggcagcagtggggaagttgttctcggagacgatccgaagagggtgggcggagagcttggggagcgaggagtcgccatcctcaagggccttgcggagggcacgaaggctggagatacaagcgagtgtccgcttggaagactggatgtcctgcgggctgccgttcaggttcagggtgtccgcaggtgggtattcggcagagcaagaggcagtggtcaaggtacggagagagcgctgagaaagtgtaacagagagggaggagtttgtggggaggttaagaatagtatcacgcttgccccagtatctagaatacttctgttaaaacagaactatttggtataaatgagatgaggggtaatcagcggcatacttgatgacagcaatgtttaccggagcggtagtagtggcccggtaaacagtctggtttgatgtaacagtctggtttgatgtagacgccatttttgctttgaatgaatagaagaacaaatttctaaagaactataggagacacgaggggagatttacttcttagggggattgttgatttggctgggcggtgagggggcaaaataatttctacggcgtagttctagttccgcggatgcgccgttcgtcctccagtcattgacctccaattagtattcaacaatgggagctgcagcaagtacgccctccgcaccttcagtggagccaccagcagcaacttgtcctgtggaccacaagactcgtgagatttggttgcaacaaaatagcaactcacctcatcctacttccggtgtccctgccgaacagggacaaccacgtgccaaagcacaacgacccctatcaacagaccgcgaagtgagcactatccctagagctggtgatttcagctcagcaagtgcttgccccgaggccaataagggttctccatccccatacgccgcgtcgcatggtagcccgtccaatgccgaatccgagactggccgcgatgaagctactggaaattggatctatccgtcggaaaaacagtttttcgaggccttgatgcgcaagggtaacactcctggatccactgcctcggcctcagagctcgcgacttccgtagcctccattatccccattcataatgccgtcaatgaacgcgcgtgggatcaaatcctcgaatgggagaaaaggggcccctcggctgaccctgggagcaagaaatgcggaggcccaaaattatattctttccggggacttggagtcgatccacagtacctgagcccgcgtgcgcgaatcaacggatggcttggctaccagcacccatttgaccgacatgactgggttgtggagcgttgtggtggtgaaaagatcgaatatgttatcgatttctaccagggcaagccatcggaaggcaatgcaaccccatcaggtctggctgccaatgccaaacccgggaagctcagtttcttcctcgacgttcggcccaaactgaacacttacgaaggttggaggttgaggttcaaccgcttcacaggtctatgaaggcatcattgatggtcgtcttctggcggaatatgctttcgcactgcacatacaaaggcgacaacggagcacgggcagtatttgggacccaattgggtatattttgcatgtacaacacatatcattctgtacgatatcaggctacaggattaagggacagtgatgaattaatgttctccattccaatacacatcggattggcaaggaatgcgcaaatcagaaataagagaatgaaatgaagcgaaaaggtgagatgattgactaacggaaatgcaatcatgcaagagggatatcgtgcgcatacatgacaacattaaagacgaaaaccgtgatggtagccaataaacaagaacgaggaaaataagagagatctatccgaggacaattgcaagcacaataatagcaaggataacagcaagaatcacaaagagacagcaggctctgttgcgcgcattcttctgatatctgctagcactgcgcaattcgacattggcgcctcgtgtgtcctgggtgacattttggacattctcgctgatgatatccaactgccctccttgttccgtaacgatgtgcgcaacatcacggaagagctcgttcagctctcccacactttgttcgatgttccggatctctgcctcacgctcgatgatcaaggactcttggaagtccacctcgccctgattcgccatacggtgttgctcctccaatagctgctcttgtaattggacatcgttgtcggcagacggttgctcgcctccttcgatagctgtacgggcagcaactgcagaagcgcgctgtttctcgagtgcacgacgctgaatagtttggaactcatccaaggtggccttgaattcggacgatagcttctgctgtgtccatttctgggagggctataagttgggacgttaataagaaattctcgctagtggataaaatcagatggatcatacattgacgtcctcccatgtctggacctgtttaatcccttctcctacatccctaaacccggtgcgggtctcttcaagcagattatgaactcgctcgcgcacacgctctgtatcgcgtttggttccaagaagggcaatctggttggataggcgagagatgttcgatgtcaaggtaaatagctgatctgagagctgctcggccagatggtcgaagtccggatcgtcacggtattgcgggtcttcagccctgcgcatggtggtaggctgagcctccaacgagtttagcctgtcaaaagacattctatatgtagtggaaaagcaattaatgtgtgcttaaagtgaaggtagaagaagactcgataccagatgagttatctgcagttccctgctgcctttgataagccgcgttggtgcgcagaccgccctcacatgacgtactatgcaactactaggctcgatatagactagctcctgggacaatgcactttgcgccacatatcacatgatgagacgtggctggtgtgttttgatgcctcaaaatattcctaggtggacctcgccgttgattctgtccgaccagctcaacacaatcagctgtcagccgtggctattcgtcaacaccgtcactagcccgccaattccgttctccagctcccggagctcgccatatgaccgacattctgatcatgctctaatcttcaacaatctcattctcttccacgagcgcatcccactcccaagctgacatcatggctgttgttcaaactcggccgtacaggcgaattttgacttcggccttgcaccgaagatttgtccatgcatctgcactttcacttctggtctcttatatcatcgcaattgcgatcggagagaaatcgtcctgtgagtacatcgcaaccttattgggtcgagcctcgaaggctcagcttcaagtcctgaaagtacaaagaactgataaaactatcctatgcagttttctggctatggtttccctttggtggttgcggtgttcgaactgtgctacttttcatatcttcgctcaccatttttgttctccgcgtcagtcaaatgcacatcggctcgagaacagctagctcctcgttcggcaccttgacatccttcactctgttacaaatcgcgcaaaccttcggctggtacatcttttcggcatggtggttcactctgatttatgtatggtcgtcttcgagtgattccaacctcgagcttgtgaaacggggcaggtgcgttgaaaatccttcaaatgactgcgatcgggactaatgagatacaggccacacgagcgaccgaccctgaacgaaaggccgatttaccttcattccttccatatgtttctagcatgcgtgcaagcagtgttccacctctactacgactacgaccgcattgcattgcccatcgcggagcaaagctccagaacaaatgacgagcgtacccatccagtaccgccaacctccaagtttctacagggtactctgctgcgagaattggcagccggggctctcagaagcgttactgttgctacagcgtctctcgtggtataccccatatttttcagaagctttgcttggagctggtctttgtactttgccaagctcttttggagcttcccgagatctgcagccgagcctcaaagcttcattccctcgattttcccctacttcttctttggaaccttggtccccggagtgttgcttgtcctctcctggcaaaccgccaacctcttctattctgtgttcatcggcaaggagcctttgaagcggggccagccactcacaacagaagccaaggatcccaatggcagtcttcttagtggcctcaaggcgaagaaggaagttgtcaagactttcgcgctctgggagctcagtctcattagccagcgcgttccggaccgccgaaaggcaattttcaatgaaattgatcgcgagggtggttcgacttggtcccaagttcttgcttgcactaccaatgtaatcaaggccatcaacactcgcatcgaggaaagcaaaaatcccgcgcctgttaccaagcccttgccgcaagccgagagatccgagcctattcttcaaactctcccgcgactttcggaaccgatcaaagatgaccacatctttactactgccccgaaggctacttcacgtcaggacaaatttggcgatgcatttagctcggcggctaaatcaatcggtcagtcagaagactggactccaactgcgcgagcccgagttcgtgatgttttcgaccgggcatcatcagcaatgcttagccctgagcaaaaacagaaatatctcgcctctgcgcagaagttcaagctacttaccggcggtccctccacaactcataaacccgaggacatgaatccaattctggcacagattcttcgttcgcctatcggccaacctttccgtcaaacatacgctcaacgcctctctgctattgttcttggcacaccagagtcctctttatccttgattgtggatgccgtagagtccttgactcgactcctcgttgccagcttggccgaagatccatatggcaaagctcaggccgatgtacccttagccgtgcgacttttgacccaaactactctcaccctggatgcatttgcccaccagggtggattgcatgcgcactggaccgatatcaatttcccgccatcgagcgatccccaggcgcaagcagttgcccgtttagttccagatgttgaaatcgtgcttgctacacttcgtggtggtctcaaggatctactgacggccttcagaccttacttgcgggatatcggtatcgcaggcaaggatttgaggctcgcaaaggaggcagctggcatcgacggggaggcggtgttatgatctatgtctcttttctgccgcaattttttaatgctatatctcatgatttctcttcacaaaacttcatgtattgctatttctcgtcctgccctctagtcctatctagattgatatcagtggacaaatgcatggttaggcgttttgttaagatgggcgtggtgggtgttggttgaaatgcaatatcagcttcagtgaatcaatacaagctttcccatatttccatcaatgagatcttcttgaattccaattaatttgtaaagagatccctgtcggcgagctgagataccactctgcaagagccttgaacgccatcgaagtttcctcggggaaattgtacagcttagtagtacgtaggacgagggcttggtcgttgaaataggactcaaaagcgcgggcacgtttgcccctgaatgagattagaaagattcatagagtacggtaagcgactattcaagcgactataggaagcagaaaggaaaattaagaattaccggtaccttcctatgctaaagaaggtttaccttccatagctggcctagaattaagcagagaaatggtaagagctccccacgaaaaattatcccatccgtcatgtcagtatcgttgtatataaaggctttagtgtatgaaatgtttcccacgaatattcgtcagcctggaagttccaaatcgaggcttatcatccgatgaaaattcttttgaggtttgtaatagctaacacttcccatgctattagacgttatgatctattggagtgagtggtcgtctcactcttttgaggtccacggaggatatacactcgtcgggaacatatgacgacaaggggcctgctactttacggacctgtcgacatggtccttgaaataagtatcctcaaatgccaaagttgagcggacttcatcaataacatcctctagctccaacaggactctgcggtccctgtaatcgtgattcagcagctatgttgataagacatgagatgggatggatggtgtagatagagggagttaggaaatttaaatttagcaccataagcgccttttatctcactagctctatttctatgaagcatatatataaccatgaaagaaatgatgatctagagagtaatgtggggaagaatgtctatggaagtatggatcacatgacattgatttctcaatcaacactaacctcatcaagtccatctacacttgttcaacacaactccaagcagcaacagaagctctaaaaaactggtagcttagagaaaccatttttctttaaaattatgtcattgacaaacgtctaccatgtgcgtcgagtcgcggatacctctgcaaaagcgtgtttgatttgttacaaaccatcaaccagtgtgatgatcacaccggacaacaaggtatgaaatccgctctcaaacctttaatttggtgtacactattgtttcttcacctaatatcccatttttatacatgcgaagtggctaattcacctaggacttcttctacgtctgccccgcacatttgcaagacaagaatttctgctctccaatcgtcgacacagaaggccaagcaaagcgcctcaaggaagaggaaatggccaaggagatcgaaaaaataaagaaagaatatgaagaaaaacaacgacgcaagaaagagcgtgagaaggcctctaacaaggataataaagaggaaaaagacaagggcaaagataagcccaaagatgaagataaagctgcatctgattcaaatgcaaaagatgaaaaagacagagatgataaggttcgtgtctttccgcagcaaaggaaatcaagcatatacttcatatgaacgtgtttgctgattctccctgccagatcgcttctatccagaaaggctctgggacagagacaaagtcagatgattcgcctcgaatcttctccttgcacaagtatgtggtgatatcgtgctcatgatagtaactctaacggcgaaacaggaatttctatcagatgcgcatcgaccggctgcgcagcattgaaatgacgaaacgcaaccaggaaagattaaggcaaccttcactgtttccgtctgtaccgtcgggaaatccttagatacattcgctcatatacttggggagtcagtatgggtagttcgagatacaaacgctagattggttcgcccatcatcctttgccgatctggcaggcacagtgaagatctatgcgaggggaaggtgatacaaaacaaaggcatgtctggctattaatttaatatctatgactttgcgcagcatttttgatactcccattagtcactgattatcgaaccattttactctgttttgacagggttgcggaaaagaacagacgcaaccgtactgaaatatcataggagttttatttccacatctatacatcttctattccttaggacttaacacaattatccgcgtgtcatatagtcctctggcaaaaagaaagctcaaagtcatagacgtggtattggccccggcacggggcagacacatacagccctagaactcatacaatgggcctccatttacaaacggaattctgatcctgcaggatgccgattgcagtagtgaaacctccaagctggtgacccgctcattcttagcacacatttttctacgaggcgtccaacgagactacgttttttaaatgaatatccagccactctggggaaatgcatatgccagatcggacattgaatttctatttcctgccataaatggcttggtgtcacgatgctctttccgtattgcatgacctggaggtgtgggtacaataagcactagtcaactagagtggtccacaaacccatcataggaactgcatcagccctagtgggcagcgtactcggtttgttcctgtgcgtttcgatagaaccattatttgtatatctgctgcggccttaagttcgtatacgtgatgttggaatgaactcttcgtgtctgtagactgccatggtacatataccgatatttgtactctcgcctccgcgtcgagacttgctccaactcactctttgtagtctagagctcagctgtgcactcgcacctactagttcgaactgtcgtctctataattgttacgtttctcgccttagctactaattaataattacatgctagttatgccgtcgtttgtgttaatgtactatgccatctcaatgcgagtccttatacggagtacatagcccgcaacatagacaactatacccacaacacttcaagaccgagacagacgcgtgagattcaactccatttaataatacagctgcctggaaaggacaatatagaattattgaagaagcgtgtctcaaatttgccgattgaatgctgcctggcaggatgaatagtgctttactagaccacgcggccaactaaactagcgccattcatataggaggcttatagaaagtgctgagataaaatgaccaacttaggtagacacgattatacctcgtatacctcgtatagattactccatagtatattggccgacactcttactcatgtgagtatagtagttagtagttaaatggtatagaagtgctttatttagctaaagtacccggcagcctataattaactagttatccagtagccgactaattcaagatgtcgatgagacactaggcttttcaatcaatagatgcgcagatatcatacaacgaagtaagactgttgtagtcatagttactgttttgaacggcaagctcttataatatagattatccagatataaataagccactatactcctatcatccattaatcccagacagacctgaaacaaagttaaatgccagcgctaaaaccgcatctattgataaactatgtaacaatgatgcgagtcttggaaatggtatctgtgcatttaataagccaagccagaccggatgggaactccactccaccgggagctccccctgcaaggcaatgtgcactgcccacccccacagggaaagggttgccaatcacggtatagatttggcaagtatgtgccgtctagttagcctgtagtgcgtaggggcaccaatgagaggtggcagactaattagatctacgattagcaagaactacacgactaatgtatgctattagcgatgtatatagtactaaaacccccaattagaagacaatataaggtcttcgttgaaagatacaagatacaataaccaatacataccagacagatacccgtaataccaatacacataccgacaaccaatcgggaaacccaggaaacagacccgctttgcacagcctccttctgcctcaaaccttggaagtcgaaggggggggaaatgaatcggtcaatcccagcgtcattggcgttacgctgatccttaaaacattcctcaaactgacagcgcttcggtgagtggggccactttaggaagaaacatcgaagtaaagaaactctggagcgaaaaagaggaagaagaagataagtggagtatgcgtttgcgtggatctacccttttgtgggcttggtgagaaactcagggttgtgcttggcgcgcgattaactaccatttttgtcttggctgggcgtggctcgactcgccgggaataataaacacgagtcgagactttggcacgttggtatgcggcgcagccctagggtaggttgggtaagccggtcccgacttcaattggttaccatgtacgattcgaaatagggctttgggtctgtctcatatcgccgatgctgtattactctctatctttgagtttgtgcaagatgcaggttttgatttgtgggacatggctcctaaccaacgggggtggtgaatacggatcaaagatggatggataggtacatgggctaggtacatggtggcttgaggcggacatggctcgtatgtttgagatggattgatatcataagtgctgtacagatcagcaggggcatgtccgctggcgtgccacctaattcttgctttgtagatcgctggatggagcacggagggatctcttgtcggattcagcggcttgtctagaaaggtcgcagtgtgctcgagcctcactatgccattgtcgctgcctgtgagtagaatggaatgagaccaggcagtcatgttcttatcgccagcgacaatgttcactctccacgtgggtaggaggtgttcccaaagagtaggtgcctcaattatgacccagctggcaagaaatgatggcttccaagggtccctcaggtccgagctcagatgtaccacatgtcactgacgacaaggcgcgtgagcgcccatggttggcacacgatcatctagaaccggacaaaacccataaatgagccataaacaaatgtaagttggagctgtaagctttcataactcgtaaaactatgtatgcatgtatggtgttcatcattcatctcaaagattgccacgcccagagtcattagctggcagggcccgcattcccggaggaagacggatggcagggttagcgcgagccatgttgacctggtatgcgatatcgacgcgggccttggtcagaccgatggctggcacgacccaaccaccacagctgcatcgaagaccctgccatgcaaacttgccgacattagacccgcagacaggattagggcaagtgagacgcccggagaggggggcatcgtcaggatgagcgccgtatgttgtatccgcgccagcatcagctccgacctcagatgggaagagactgggacgcatccaggtcagggggtggaggaagacatgcccgcaatcggcagttgctgaggacttggcagtgtttttcttctcttcttcatgcgggatgatgaatggagtcgttgccaatttggttctgtgatgggtttagtttttctgaatatgggtttagatcttcaactgtggaactaacctgcattttcgacatttaatctcgaccgttcgaccggtagggtcttgggattgaacgggctgttcatcttcaaatcgcacagacttcaactctggggcacggccacacgctacacttccttcgacatcgcggcgataaagccagcgcttatacgatgggtggtcggtgacctcatctgggcagcccatctcatggtacaaattcagctgttccatgaagccatcgtttggctcgcataggggcctgctttggcggatcagcgtaagggcagtttgcggtgtgagtgctgccggctgccggtggagcaggtaggcgatgcaaatggccgcggagcgggacttccccatcgcactagatcatattagccagtgtacatctttctatgataagcaagactaggggcaaggcttgtgggcttccagtaaaagggtcgggccaacgcgcatcagaaccttttacgggattcttcagccacgtgtagatcgcacttagatcgcacttgatcggatacgcaatgacgtaggaggcacaaagccactcgagaatagcattccgcaagaggaataggaacgactgaagagccgggacagactttccgccagtaaaactgaaaattttgcgttttgacttaccagtgcacgagtacacctccaccaccgtctaggccggactgaataaacttgatagcggcggggatttgttccaataaattttcatcgtcgacatcgtcaagtcctatggaaagatgctggtaagacttgaacgtctccatttcctcagctgggttgagacgcagcaccgagagaacatgcgagatatctgcacgtgccaatgctgctttgtttttggcgcttaatatgctacaatggcgcgttagcaatgaataaagaccgcaaattaggaactgccaattccatctccagcctcagctccattttagaaacatctgggcaaggattgtctgttagcgaagtgagaccaaccctccgacatagatattgtggccttttatttgattcatggccattttgagatatggtggctgcacgttgacagcagcagtatgttctgttgatggcgacagaaaaatacagaatttagaagctcagctccagtgccagtttgataacttgactctttttttcgtcctagatcgcaaaggcggaggttgagcctcggcgctgccaaactcaaaaagtctgatagggcaagggtatgacaaagcaggtgactttgatgcctcaggcaaatatattgattttccgattttccgatctagtatagttgtcagttgatttgaactccatttattagtcctcgaagatgcacgagtacaacataagtacagctggaagagagtgtggatttgtatacagcgtggcactttggtggtcatccactatgaggatctcccccactctacggagtagggctgtcctaattaagtaaattaagtacaggattacagtgtctacgttgtagttccaggtgtttcgtgcacagatagattaaattacaaagaagtctagccgagcgttttccgagcgtcatttacatccaacaaaggtcaaacaattgacgtccttagctgatgatatgattcgctacgcgagctgcaaggggggggggtgctcacggggcaacaaaaaaggaagctagatttaggcttagttaggcttaccgcggggaacttggacctaaactgatcaggaatggagccataaacggggacgaagccatatacggcctcgctactccgtactccatacggagtatataaaaacggctagcttgtcccgcatcacattgactagaggcgtgacacgcgcttctaggctgcagccctctaaggcttaagctgcctgcgcctcaggaggtacggagtacaatgcagcaatacacgggctcttgcagggcttggtttttgctgacggcctgggcaaagactgggcatgtcagccgaaggcggccgaactaaggagtacaaaatccgtcaacccctccctgctgacggactaagtgttattgctgcctgtcactgaaaaatgcggaaacgcctcgatgcagttgtgtagcctacctagtcagccgtcatccgtactaagttaacgcctcctagaatatcaactagcttgacgatgacgatcgatggaaaatacatacatacatactggagcctgaaacttattaaactggtctttggtacgaagtacaacatacagaggatgaatcactgtagagaggtattaacctcccgccaagagattcactaccaagcaattataaaaccctgatgtcgagctacctaacggagaaagcctgcctgttggaagaaaatcattactgcgtacagactaagatgcttgatcagaagatccgatcgtcatacgcgtgataaggctccaggggtatacatataaatctcccacccgattatagtccacacatatattgtatcaatgtagactagaactgaagtctaagtacaaggatggattgcggtatgaaatatacaccatttccatttagcgatatttcccaaagaagaaacccaaaaagagatttcgttctcgaagctgatgtggagcaggaatccgcttactcagccctgccccctgcagccctggagggtttgttccaacgttcttatttctcttctccccttcatcgccaaaacctaggccattttcagtgatttttccaaccgaattgcatgcagcatgtcttgctcgatggatatttgatcataccacaagcgtcaaggttcacacccccctacgcccaaatgacaggcggaccggcagtgtggcagtgcatgcaatgccaggcgccaagtggggggcgctagtaaatcagtgggtcgaaatgtccaacgactgcatcgtccgctttttttatgtggaggcaaaagaatgttccctaatgaatgtagggcccccgaatcctccgaacgcacaagatctcgtgtatactcatcgtaccacgagttgcacatgtatcgtacaatgtacacgtacttgcgcggcagttcaggatcaaataaccccgattaaccgggggtgttgtcgcatgcgccccttggctgggagatattaagcctaaatgccaagagttccaagccctggtgtgttctcactggttgccaagctgcacaagaccgtgccaatctatacttcattctcccaaggactcggcgggattgcggtacccctctctatgaacaagtttcgattctagaaaagcataaaccatggttcctaggtgtttctgtcgttgtcggggctgggttggtctcaccgaaggacctttcaccttggcgtagggctaataaaatacaaattttgtgttttttggcatgagacttggtagaaggtgagattaaagaacgttatatacatcatccgctgggtcgcattgcgaggcgtccaatatacgagaaacccccacctatccgcacggccattcggcaatgttctggttggcttccatgatcccgtcaaataatgtgaagactccatatggggtaggatagtgcgtcacatagatcagcaggaactgttggaacttggaacttctgggccagtctattgattcccggttatggactggaccatatattggagctatagaagtgtatcggatatctacaacatacgtaaagcaaaattacatgtgttaacgctaagccttgtgccctaagaactgttgtcattccaacgtggcttcccacgcaagatccaatgagataattgtcaataatctaatgtttaattcgacctgaatacccataactaccatctataccccgtagaagcaatccattggaaaatacacaacgtccgtaatggtatgtaacagccatgacccatatatcctcgatacatacatatacgccctttccacgtcacccaaagggcagccctggccctgcctggcctgcctggcctggcttgggatgtttcgattctttttctttttcttttttcttttctttttcgcctcttcgtctttgattagttgaaaccttcaaatcttcatttttcccttctcccttgaggatgagatcacctcaacttgcccccctctctttgcctgaattggatccaatcgcttgcaccgcccgaattcctacccgatacgatctgggcgcatttcaattctcaccttttctctttttgatttgacctttggttttgatcttcagctccagcgccagccggcctttccttttgcccttttatttatttgggcttcagctagtggggttgccatacttagagtgtgtgtatttctttatactcaaataccggggctccatggcaccattctaacatgccctagttctagctgtgctattcttttctattccccattaaacatgtgtgcatctccccattgagttacagtgtggccaatttctatgggacacagacccggttctccgtgtgtcacttgcgggaaaacgtttcatcttatgaggcgaatcgccgaacaagggtcccgaggtaggtcttcttcagccctattcttcctactttcctaccccggtcttttattatcacgtcaagcccactttcaaatcatctgacgctcaaaatagactcacaagacttttatcacctgcatgaagtcctctaacattgtcctataactactcttcgactcaagtaggcagaagctggaccttctgagaaactccttctcggagtgtgaggctggtgaacggcccgcttaacaatctgaactggtttcacgaccgacatttgcactcaactggattgggttattgctgggataattgagatcttgattcgacctgcttgttccgatttatatcaagctcgactcttctgctttactgggtttctcagctggatgcgtgcccatcttgatctcgattccggctctatgttctgcgtctagaatggaccttcgattttctcagtcgagcttctatgatttcagacagcacagacgccattccgaaagatcccaatacgctatgcccgagctgaccgtatcatctcacggcccgttacctatagccccacgaaatagagctactatgaaacctgcgcctccgccacttccgcccccatccagaatccccgctttggagatgggccatgaccccggctggcagtacgcaaattctcaaactccgacttctctaccgtctatcaacccgggctcaagtctgttcggaggtcatcgacggccggtaaccgcctcacagggtgatccaatgcagatagacgagttagaggggaggcagggagctccactctcgcggagtcctgaaactcagatccagatccagccaccgccgtcagctacagacggatttccaaattccatgtcgatcatcccgaatccgacaggtccagtgtaagcgcacttaatgcgcgaggagtgcgaacaacttggtttcgcagtaccgcgcttttctatatctgattgctaacacattgatagtttgagtggcgagcgcgaattttcactgcgtagtgtcaaagactcatcaaatgcctacgatcaacatctattatccaaaattggaaagcctcaaatagcaaaacctccgtcccccgggggatctatcagtcttggagacagccgaaattcgctctctgcacttacagttccttcacgaagcccaagcaatctgccatcacccgggccttcagaagggtcaacgctggatgtgaaatggcacaatagccctcagtctgggggcgtttccccaaggacaaatgtcaactggagagagtatgtcgaaggccgaagcccaagcgtggagagcaatgcaccatcagcactggattacgaccaaggatctttccgacgccgctatcgtggaacaacgccccagcgagaagatagcatcagtctaccgagccgatcgaaccgtggaagctatgaccaggacgttttttcagatatcgagggagagttttcggccgatgagccggcacccccacgacaattcattcttcgagagcccacaccgccgtatccggattctagacagggcatgaaacgacgggcatcctcacctccacgtgagccgataagcgacgatagacataccttgcacatcgcgacgagtaacggagacttgtctcagcgaagactcagtggtcatccgttcactaacacactatcggtcaaccccaactatcccgcgagtcaacgaaccctctcaaccggctcgtccttgagcatccggacctcgggctcgtattcgtctacgttgtctattggaggtagcagtatgaccagcctttctccgtacgatcggccgcctccaggtggtttttcaccaagctccgacctcgatactttccacgagaaatcaatcctcaaccccagtcctcctgcggcgctatctcacgctacccttccaagattcccagggcctgcgtcgttagaaccgcctgcgacggattccactggaaagatgtctgtcccgactattatgagtttgccaaagccagccacgccgaagatcggcgggcttttcatctgcgattgctgtccaaagaaacccaagaaattcgacagcccagatggcctgcggtaagttgatcgagacgtcttcatttatgatccatactaatttagacagtgcacacgagatggagaaacagtacgcatgcgcctactgcaaccaccgcttcaagaacaaaaacgaagccgagcgacaccaaaactccctccacctccgacgccattcatggtcgtgcgccgcgctcgtgactttccaagcagcattccacccctcaggcgcacaggcctgccagaccagtgccggggctgcgcgtgacacctgcggctactgcggggaggaattccccaatttcccacaggcagactgggaccaacgattcgagcacctgaccaccgtgcacaaattcggcgagtgcaacaacgcgaagaaattcttccgcgcagaccacttccgacagcatctgaagcatagccatgctggcacgagtggaaagtggactaacatcttggaaaatgcttgcatgaaagaagagcagccgccggagcctcgcgagcctcggggaccaaaggataaagctgcttctggcccccagactgggtcattgacgaccaatgccatctcggaagttattagtgagcaatgacaatcaataagtcgtgtctcccttgatcgcggatttgctcttccttgtggcatccggctacaagacggtttccggcaaacggctctgtgctgttaatcacatttgccagttcatactctgcagttagatgatagtccaccctcgtggcatcgtctactctttttggatatcgagactaaactcatttgcattgtatttgcaatcatgggtattaaactagaattctgaatctccaccacatacctgttcataaaaagacagcatcacctcaacatcaatcaacaacaatctcactctcatcacaccggggacattctcatctcacaaacaaaaacaacaaaaacaaaagcctctcatattcattctagaaaaggcaaagtgagacaagacacttaaaaaaaacccacacaaggccaaaaacaagcctgaactcacgacctgaaacgaacatttttgaacatttccttttccacggaaagagaaaggggggagggagggcgaagggagtttatagtcgggactgggatctttttttcaggatcaataaaaacctctgtgtataccccggttgcattgcattgcaatggggaggattttcctttctcattctcatctcatctcatcttttttaaaaattggagtcggtttcttggttggttcctcgactgggtggactggaatacaaggatgaatggaatactggatggaatacctgcgttcggtttgtgtctattctggtttttgctgttctgctaggctcttatatatattcccccgcctgttttatacatactttggatggatggaactgtgaggcgaatggaggggcgttgtatatatattctttttcttttgcatggtagcctgaacgaaatatgtggctttatgcctttttctctagttattttggttctttccaggattcgctggtaagtagacttttcagtattaaatgtaaatcctcattttgatatacagatacacctagtgagtaagtaggtaatgttccactagagaacaaagtaaaagcacaattattcaaacacaagactcttgaacccatctaaatctaatagaaaaaacagcctggcccaacccagaaggaaaaaaaaaaacccaaccaatctccacctactcagtaacactgtccttaatactccgcagcgcactcaacttatgctgaggatcaatagcagcagccatctgcgcccgacgccgggcatcagtccaaaccataaactcgccataccccttcggcataacatgcacatccttctccacaaggaaagtatagttaaacatgcccgtggacttcttcgtgccgtgctcgacatcccgcaccttggagtcaacgcgcacctgcaccttggtgtacttggtgctatcaccctcgcgctcctcgggctccgtgtacgcaaccgtggcgcgtaggtacagcacgctgcctacgggaacggggttctcgaaggtgctggggtcgagggcgacgaagtttggtcgcgcgtgtgcgaaggacgcggcgcagcagaaggccagctcgaaggtctgttttagtaggaagccgccgaagatcatgaagttgtggcggttgcgatattggggttgcatgatcatggcggatttgaggacggtctcgcccatgaatacctggtttgcggggcgggtaactgtgctttgggggtctggggaggttagttttttttgcataatgggtaatgtagtgggtgaaaagcgcttacttaagtaggacatctcctttgtccacattgagtggatcaggttactctcttcctcgtcaggtgctttctccaagaggctgcgtgtgcgacgggccttcttggcctggtaattcgcctcgcccttttggaagaggcgtttttcctcttcagtttcaatgatgagaggagctattgagacaggcctagttggctgttagtttgtgtgtatcacgccataagaggagaacatacttcttggtagcaggatccagagagaccatcgtgaaagcacaagtgatcaagacatcttcaggtttcgccggctgtccttccgggcgggccttattgacctgaagggagatttccagactggagcgacctgtcgcataggtacattggccgctgagctcaaggtcacaaatttccatcagcggattctcaatggtgatccggtcacacgccgcagtgacagtggatacaccgtcacctgtgtgacggtaagcaacgatgccagctagggcatcgaggtccatcagaagcgagcccaatctaatcgcaatcagtcaaatgcccctttgatatgtggctatcaaatacgcaccgaatatgcccagaggaattgagataagaatccaaaagccatttgtcttgcgccaaaggcagaatctaccaaccagtcaataccaacggttccaaccccacgatataaaaatttcatacgcacagcactgtaatagctatccgacatcttcttcggcgtgacatcacgcttaatgctctcatcctcatgcgggccaggcttctgagcctcgcgcatttgtgtcaacgcgtcgatccacggagtcttgacgcgcatgggcatccatgttggccgggccgctgcctgcgacggcgtggagtgaaaatcctgggtgttgatgcaggatggctgagctgcgactgcagctcgcgcgggcagcgcagccaaggattttgagcgagcgagcgctgatcttctactgaggccgaacattttgatgtcgaaagaagggggattaaaaattagataaggatgtagatatcggtcgattgtactccgtactcaaaaatgacgatgtcccgaggctctgacgttacggatgtctccagtgaccaggacagatttaatcacatggtaggttggcagaacgttaccgccctggtcgctggacttttacagtgaatttactggcaatttacttgattgttttgctgatttgaatggcagttagttctgtggactaaatttcctggcaaatatactgaaacctacatattctaacgagctgaagtgatagctcatgagtctataaattacgtatctcatggtcactgcagcgcgccgtgagattatttaccggctccggtgattttcggcccggataagagaaacgatgtcatcacttccgattgggaccccgggtttttatattgttctgtagatgtttgcagctgaaagtgacacctcgaagcacctgaaatggaatacaaaaatctaagactaaagaatcacaatctagggactcgattattgctccattcaagctgtcggctaaaacaactcccggttgccatgtgtatctgtaagggttcttagcagtcttgcagttcggaagaaggttgttctgtatcatgcaaaactgaatacactcatccacaactcctttttcatttcattaaaatgcggagggtatatcgtacgatgattgtatcttggagttcatttaagcttacatatagaaccaaactttccgatggccaaataacgtcaaaatgaagtcatcaatctgatattggtttataacactcacttcaaggcgattaactctttttttgcatctattcgaattgacattgacttgaagaacctggaataaaaacaacaacatctatttccaacatgagtgacccaacaaacccgcatatcaaagagcgcaacacacctcaatggggtctctaccagcgagagaacttcatgaaacagagagaaggaacgacaccacttttcaacactggtatgttttcaatatgatctctccaaacctacagaaaccctaactcttttacagacccccggaaactggaagaaagagccaaagagaagctgaccgagggcggctggtatatatacctccccatcacacgagctcaagatccataagctgacaagaagcaacaggtactatgcctcctcaaacgccgggatgtcaaacacgcacctcgtaaaccgacaagccttctaccgccaccgactaatcccgaaccaattaatcgacacaaacaaccggtcaacaagaacaacaatcttcgaccacaacgtctccgcaccaattggcttcgccccgatcggaatcaacaagatctaccacccaaccggcgaagcagcagtcgccaaagtcgccaaagagctcaacctcccctactgcctatccacagcaggcagcacctcgatcgagaaagtcgccgcagccaacgggccaacaggcacccggttttaccaactgtacatgccgcacgacgacgagctaaccgtatctctgctcacacgggcatgggaaaacggcttcgacgcgctgattctcacgacggatacgtggcagctcggatggcgacacgacgacgtcgcgacgtccaactatgcattctaccgcgggttcggcgcggacttgggacttacggacccagtgttccggagcaggtgtcttgcggacgggattgatcccgatgtcgatattgtcgaggcgtcgacgaagtggattgattcggtttggcatgggcaggcttggtcgtgggagaagatcccttggttgatgaagacttggaaggagattagtggggggcggccgtttgtgattaagggcattcagtcggttgctgatgcgagggggtgtgtggaacttggggttgatgggattatcgtgagtaaccatgctgggaggcaggttgatggggctgttgctagccttgatgcgcttgagaagattgctcaggctgttggggataggatttatgttatgtttgattctggggttaggggcgcgagtgatgttgtcaaggcgttggcgttgggggcgcggtttgtgtttattggacggctttgggtttgggggttgagtattcagggtgaggatggggtcagacatgttatgaagtcgttgctggcggatttggatattttgatgggtgttgctgggtacaacggggttcaggatttcaacctagatattcttggtgagtcttgtctttgctgcggtgtaagagtgaatgctgattaggagatgcagagtcggatccgaagaactacacgctcatcccagagaagactttgtgaatggagacagaccaggcgggatcctgattaaattgtccatagcatagctggtatagggacagcttgttactttagtctatactcaatctacaagtcctcggctacggagttttacacccctcatgtattccgtaggactcgtcaagtggctatgagagccacgacttcaggaacgtccacgagaaagactggtttgttatctgatgcagacctacatggacctcatgcatatggtaatgttatgatccctgtggtaggtgaagcagcatgtgctacggcactctctgccgacactgtctcgtgggggctacggtgagatggtggccagagagatggggagagaagaagaagaagaagaggagaagagaaatggggggaagggtccttttatacccccaacccacgtgccttcctcaagtgcgacaggtccctcgctccttccagtcaatgtcaatgtcacatgcattgtgccttctttgtttgccttctttgtttacattgtttgcatagagcacttccaaggaaggtgcatcgactagacattacaactggaaactgtccatgagggattttggcgccttgccaataatgtagacttttgtctatataaatgaaaataatagcaagccatgtccagttcaaacgaaggatacatgaatgtgcaacacaaaagagtgatatatgcagccgagaaaagccgaatagacaaagtgccgcaaacgtatgctagatgagtgggctaaatatgtagacccggtgtatcaacagaagtgacatgatgtgagtgtacaatgattgacaatatgcacagaaaagacgtgggcgacaaatgagtgtacagaaatagtaatacaaaggcagaaatgattgtcgccaaatcagaaaaaaatgccgggaagggaaaataggctaaaatgcagttcaaatagcaaatgcgccgagcatgaccgtcagcatagaccagctaatgccgcggacgaggtgggatgcagagccgccggagactgtggccattgtagaggaggtcgatgtagcattagcggcagacgcagcggtgccattggacgccgatgcagtgaatgttccattgcccacggatgaggaggatgaggagtttgacttcgaaagcgcgccgaatccgatctttccattgtcgaaatcaaacacggtgtagacgtttttcaaaaagacatcgccgacgagccagtttgcaccgtttgatgcatagccgacaatggtcgaaatgcagtaatctgaaccggtcgactcggtatttccgacatagtccttaggcgagacgctgtatttgacaccagagaactcgaactcgatagtagcagtcgagttacaggggatcaagtagttgttcgagttggaagactgttgggatgaaccggggacgagagaaaacaggactttggcatctttcggagggatcaggaggtaggtagtgccggtgtcgatggtagcggattttccggtgaagttgcaactctttccattcacataagcatcatccacggggatgctccagattttctcattggtggcagtataggaaatggtaccatcgaatttggtcgtatcgaccgcaccaaagttgatttccccatccttcgcattgtctgccgagcgagagagactgaacccaaccaagtttgatttgatgagctttttctccgcaacaagatccatgaaagatggcaaactccaccctactgtacccgagcgacccaggcccaggatcccgtcgaatggataactctgaaaagcttccgaggcattgtcggcttgaccgaaggtttgctcgacttcgagccctgcaagggagattgcgtctttcccaatctttccggtgaccgtgccactgccgtaggcgagggtgaaagtcgaaccggcggtggtgtagctggtggatgctgactggttgaaagtgtgatggcttgtgcagacaggctccgtgcattccgagtcgaagacccaggtattgggtgctccggtgtcgattgccatccacatttcttgcttttgggaacctacgaggacgggagagaagtatgaataatccgttccgtcctggtttaacggggcgctgtttgccaatgacggcgtatgggactcgacgatcttataggtatcgtcgcggcgaacgggcattttctttaggtcaatggtgaaaggtttcgtgtcggctgcgtcggtactctcatcgtcagatttggcatcaatcaaggtccatggaacgaagcgacgttcgactgtagtttccgtggagagtttcattcccaattcccatggatagaaggcgtggacgcctgatatgccggcaatgaagaccagacatgatgaaagatgcatggtccctaggggagtttaggcagaatatagagaagcccgcatttgatagaccgaagccggattcaattgtatgtctcttcatgcaatataaccgctgtttcctggtgagccgaggaattgaaccgagcagctgaatgaatgaactaagtgacagactaaaattgaaaagaaaggctagaaaagaaggtatgaattataaaatgaattgtaaaggcgaggaagttcgagagactcgaaatgtgaaagatgggaggtggcggacattgtctccaccgttgaaaaaacccctgacaagaagttggccaggctctaagccgtaagaggaatagtttccaccttctaaggctcgttttagtactgatcggccgattaaatgaagctagtggagcccaaactcaatgtcctatagaaggaactgaacgagtcaatatttgatcttgaatcttaatccttggactatttttataccgtagactatggatactttagagaatctggggagggaatgtatcaatggtcacaaagtaatggaaactactccatatgtactttacatgaagttgaacagcaaacgttgaagtttttcgtgggaacacatacaatgtaaagatgagatagagcgaacaaaaatggaagcagtaaaatctcaatccgcagaatgcgatgcgacgatatattgcccaatgcccagacaccattacaacgtaaggtctagactcgcaggatttacgcctccactcgggtcgagaacgtctgaccctgataaccctgacagggaccacttttttttgcagctagtacataccgcaagtcactgttcgctgaactattcaaattgattcaagtttaaattccagtacggattttgggcatttcgacctgatccaattgcctgaagtaggtagatcagtagaagacctaaaacggatcgaacatgtagatcgtgagctaactgtggagacagatcaatcgaacacatccaggagttccaccgctgtgtcacaagctgtgcgtactccgtatatcatgaaacaaagccagctatctgaaaactaataatttgtataccatatatcgctagataataagttagagcagatgttatacgagtacaaattttataaaactactgcctaccatagtgacactgtgcgacatgttactattcgtatctcggtataagcatacaaaagttggacattggtggcaatatctcgatttcatacaggagtcacgacttttgctattgctccatcggaattgacatttggaatgagcgaatagttactgtatagatttaggtcggctaaatgggcctagctatggagaggggaactgcctggtaaatagtacccaattatgcccgaagaaccaaagacccaaggaagcacacttcatgcccaaggatctttagggctatctcgaagtagataaaatcatcctaacaaagacacagcacccgtagatcagccacaaccccttaactacggcccaaacaaccacaaagcaccagccacatccggcctcaactaaaacaacaaaaggaagaaaaaaaactccaatgacgcaacatccaacaaacccccaaatccccaaatccccaaaaaagattgataaaacaatcagataatcaccccagctcaccccgaaatagcccgagcgggacctctcccttccccacgacatccaagccccatcccatccgtcccaccgactcagcggcaccaggaaattgcacggcaaaaaaacatacctcggaaccgcgaatatattaccgcggtgccgatagacacacggcaagaaaagaaaaagtgggctgattcgattcggtatccttactactagtctacataactagtactagcgccggtccgtctgagcgcgaacgtgcggacgccattgttccggcggtggatagggacagttatcggcatccgggcttaactgtaatttttagggttattggacacccatctcggcaggcacacatgcgtccgataactaccgagtatgtagttagaccgcagtgtcatccgatgactcacgtctggagctccgcggctggtctgctgacctcgggtcaacggtgtttttttgattaacggcggaggagagatgcccggggaactggatcttcacttgttgtactccgtagatcatggtgggtactattggatttactgcctcggcacagcggagaaggtgtttttttcgggtttattccgcgagtgagggtattgggtcattgtggcaatggattgtggtaatttggtaatttgtagattggaaaggtatgtggatgaatgtgattgtgtttgaattgctctcgctttgtacctatctatttgctgtatctaagtatttagtagggtatgacttatttcgaagatgtagatagtaatgttcaattgactgacacaactcgacacagctgtggaataagatgaaaaagaaaacaaaaagccatgatcggctgacatcatgaagacgtccacatgggaaagataatacatcaaaacgctagtatctcaaaacagtccgacgaacccaaacatgaaaaagacatagcgtgaactatgtatcaagcatcacaagaattgtctcatcccgtcaacaggaccgaaaacaacaagaatagaccaaagagacagaatctacttcctgacactctgcttgggccccagaacatcatcaacgaagccagcccaaagctcacgtatgacaccgggctcagaagtaccattttctttgcgctggagctcctcaccggcacgcgagcggccgacggcctcggtcagcgagaacgggtcaaagtcgacggcgtggttatcgacgacctcgctcatcgcgctggcctggacgtcggggccggcgccgccggacacggtgtagatctggggcttcatggatggggggctaggcgtttggagccttgtggagggcccggaaaggaccgggacttggatggggcgctgcagaggggcggcatcgagctctgccatgctgggcatgtagacgaagtcgacggttgagttgtcgtgtgtggcttttgaggcgcgggaggtgttgaattggcgggaagaagggctagagtgtgttagttttgggtttcttttttgaggggttggattggaggtaaggatggatgtatagaatggaatgtgtgggacatactctgagaatgcattgccgttgattcggcgcatggcgatgctgaaggcgcgggattggaggacatcatggttggagagggccttctcgccggggttgacgggttgagcggcctggactccggtgatgtgaaggctacggcgagcagcagatgccacgggctgttgagaaagagcgcggacagcgcggagagaagatgaacggggagcaatcattgtgatggtatagaatgtatagagctatagctgtctgagatagagctatgttgggatgcttggtaaaggcagaggtcgccaggtatagagggaaagtggaaaagggggagtgagaagtgagggagcagagtataactaggaaccggatgggagctttatagagcccggggaatggttggggagagctatgaggccacttcttggcggtctggaccgttatcgatagtgtcagccagaaaaagtatagcacgtcaacactggagaaaagatatggagtacaacatagtggatttgttggattcgttggatttgatttaaaatcgaacagaatgtggataattcagactttcctctacaaatgtatcctcttggactaccatggctgttgagtccaatcccccagacacagatctacggcgtaagtcctatcgggactacaccccagcactagcagtgacaggatgtacctggtacatcacttaccccccgaaaatgatgtattccctaaacatcgtatcttcccctcccaaagtgaaactggtgatcattacgtcgtctctggaagatcatccaatgaaataaccaccagcatagacagcggccattattgggtgtcttcctgcagaacggggtaacgcactccctactccataatcgtaacacccatctgcattgtccaacgtagtcccccactcgacgagaagtggaaaagaaggcggagagggtatccggccggagatacatgccatgcacagcggttccgttatgcatattgctctggaatccccgagttgtgagtggctcccacgcccaactggtgagtcagtctgcaccaaaccttggtcgcaagccacaaaatgtaatgcaattccagttctgggaaagaccggggttgatcgccactcctcaacgttgagtaatcccatgacctgatagtggaccttgaatggattcgaagaacaatattccaagaccacggaagcagaggagtggagcggtgtgagattcggagttaggaccgccttccgagtgatctacaaagtacgacaacgtacacttttggcaacagattcgatgtgctacgcagtacaatatgcaacaaacagttatttcgtgcagatgtccttgatcgtctatggtgcgacgtgtccgtttgtcctttttcaatttccagattcatgcgtttctcaccccgcaatcgcttaatatgcccggaacctccggatcaaaggaatcgtgtgagatcagcagaccctacggagtacggaggagaggtgctgtaatgtttttatggccaggggcaggcaagtattcgatggctgtaagggcccgcctggggaagtgtcgataatcttggcaggaatgaattgttcccctttcctccctagatccgagggtcagaaatttggggatttttgatcataggtcaagtaactagtaaagtaggcaaatatactggtctaattaggtaggaaatatattctgtatggtatgtcctaaagtaaatagatggctaacgtcaccgcgctatgcgattggtcaacactgcaatcccaatgcaatatctctcatacgattatccgacttgtatattcaaagtttcgaccccggtcgccgtcctttagctatggcccgagcgtaagggtgcgagcgagatgctggaaccagatggtcaacatccccggtgtgcacgagatcaggggccgcctccgccagggatgtgatgccaatgttccgcatagctgtctccagctcatcttgcatgactgaagaaacctgaatcagcaaactatcaaggcaatatgtcaatcatcacttactgtcaatcagatgctccactccctcctggccatagttagtagcaaagagcatgctccgacccattcccacggccgttgcgcccagacatacagccttgaggatgtcagttccacgccgaataccgctgtccacatagacctccatatgatcaaagacctccgggcagcgtctgtggatctccaggagcgtgataatcgacggcggactggtatccaggttgcgaccgccgtgattgctgagcaagataccatcaagccccgctttcatggcgagaagcgcgtcatccgctgacatcacgcctttcagacacaccggcttgtgcgtgtgctgcttcacccatttcaaatcctcccatgtcagcccaggatcgatgaacccagccatgacgcggccgagaccgccgcctttcttgtcgttctgcgctttcgacggcgacataggcacggataagctctcgtcagccttgacgcgctcgtcggcttcgcgcttaccgggccacgcggcgtccacggtaacgaaaattgctttgatgtttggattcgctgagcactggcgaagcagggcggcggactttgctcggtcccggttgacgtacagttggaagaagaagtcggccgagggtgctgccgtgcgcagctcctccatggtgtaggatgagttatttgaaatctatccagatcgtaagctagtgactgacaatggcaacacctatataagctcactccttgcatgattcctttgcttgcgcaggctctagcaatggcgcactctccatccgggtggatgagctttgccattgctgccggactcacgaatagcgggagcttgtaactcccgccgaggatatttgtccgggcatctactgaacggacatttcttaggactcgcggacggaaccatatgcggtcaaagcatgatttattagcgtcccgtgtgatcagatctgtagctgcgctggagtagaaggcccaggtcttcttgctggcggtttttgaagcgacgacctcgaagtcgtgcgagttgatcagtgtctccaacgggggtttctcgttttctagtatcaccttggcactctgccccggtggtggtttgacccactcagcgtcaattgtagattcatcgaggacgcccttgaacttctccgggtggagattgttcttcattacgctgggtgcatggacttctgaataggctttcgttgcatctctccctgcatgcttcaggatgactattcgcgaggtacatcagatatcgtgctgagatcgtgcatttgtcggtgtactaacttgcagatcctccgggatgctcttctaaaaagtcggtcacatcccacacctgtttgtcgaccacaacccagcagtcgccgggcgttttgtgctctgagatctgctgagcagacagaagtttttggtctgccattgctgtcgggcggtatgagcgtgcgtattcttaggtcagctgtggagaaattgaccgcgatactaaaagacgccggtcctgtatgtcgaattgtgaaggagattgaatgagtggagacaattcgaaacagccatccacagcgagctaaatactcagcaagggtcctgggcggggatggccttcggtaatgtccccggacttaccccggactgcgcgggctaaagtctcccgagctttctgtcgagcatctaactttctatatgtagtgctgtatgttgtattcacacttttgaactggtcttggatgtctttaggatcaccctacgcaatcagccccagacgataagaacagcaaaagaggttggtgttcaatctgagcttacacagaatcactcatgtttgacgaaatctaaccccctaaaggtgtctcgaatcggcaacgcaccgactggactacggatttcgctccgagcggagacttcgagcgggggtgagatatgcctcctgaaatgtcaggcatcattcatcaccagccacattgaatgcctcagccacaatgcggctgagaactttccgaccggaagtcaacacacatttcatgctcgacagaggaaccatctcaacaacacaataacaaggatatctactctatccatctaatgccagtcaactctgctgttggctgtgctttgaaaaattttcgccgcaatatcacctcgggtgtgaggtcaacaggcatagatagacctgtttcgttaggtttgtcttgtgtccaaatacaggcttaccacctagtctagccgtggaggctgagtgatctggcaaagcttggactgactcatttcgtaggttttcataagagtcacagcttgactggtctgtcttctataaattccatatctgctggaaatcccaggacaatctccacaattgaaagacaacagaccacattaaaaatggccgaatctaaacctctccgatatgttgatgtatgtcccctttgtttattttcgaaatgctagtcaacacatagctaactatgaaacactagatcggtatcaacttgagtgatcccgttttccgcggtaaatatcacggaaagcaggcccacgaagacgatctcgacgacgttatccagcgtgctcgcgacgtaggctgctcaaagttcatggtaaccggctcagatcttgtagaatcgaagcacgctgtccatatcgccagcaaataccgtgagttatgagcttgcccggactttccctctcttattaacaacggaattctacagcgggcttttgctatgcaaccgttggtgtgcatccctgtcaagcaaaactcttcgacaaatacccaggcggcccagacaaaatgttggccgagcttcgtactctagcaattgaaggcacaaaagccggccatgttgtcgcattcggcgaaatcggcctggattatgaccgactgttcatgagcgccaaagagccacaactcaaatatttcgaagcccaactagatctggctgttgagattcagctccctttattcctccactccagagctgcaagcgaggactttgagagactccttgccccgaggcttgcaaagcttcccaagcggggacttgtgcacagcttcacgggaacaatggatgaaatgaaccggatggttgcgctgggccttgatgtcggtgttaacgggtgcagtatgaagactgaggagaacctggaggttgtcaaggctattccactcgatcggctacaaatcgaaactgatgggccttgggtatgtacttttcttagctttgtctggattagtcgtgactaacctatcccccagtgtgaaatccgtccttctcatgcatctgccaaacatttagatggtgcgccggatctaccgaaggctgtgaagaaggagaaatggcagaaggggtgtatggtgaagggtcggaatgagcctgtggccatcgctcgtgtggctcatgttatcgctagcgttaagggtatcactgtggaggaagtttgcgaagcgtaagatgttgattcgtcctgatgcttggctctatactaactattcttctctccagtgcttggaataactctattagaatgtttgggttgggcgaggagtcaccttgattttggtattgccgacaagaagatgtgatgattcagggcctttgctgtagctatctaattatgacagccatggcgactgggaactacctagtacactttcgcaattgctcaaactcatggtctcagcagcaaaaatataatgatacatctcaatggtcagggtcgtaaacattatttatgtggtattatatatcacaacaaaggtatcatataagaatctaaagataatcagccattataatgtccgcatcgcatgcctccatatcctctcggggatcataatctatcacgtagttttccggataatccgccaattcgccatgatccgagagaagcatagcatcacggtcaccgtatgaagtctgggaagacccagttgtcgataacaatgtatcaagagatatttgcgtcgattccccgatgtctgtgaagcttgtctcgctgaaattgtccaaaagctggtcctcggattcgctattcaacaagcacacgtcgctttcttcattctcgtcgtgatattttgtttgagaagaatgacactgtcccggattttcattatcaggttgatgctgatctatagacgtaagatccacgagctcgtctaatccagccagtgcgttcgatggaaattctgtgaaaagcatcgaaactcctcttcttctgggttttattctgggcacattgttctgcgcgacacaccaaagggatgagaggactgcattattgcaacttggaagttgaggctgtatcgccaagtcacccgtctgatgggaggaagtgagctctagcaaatctgccaatttagctttggtggatagattcttgtttcctaccaccaaagacgatatggctttcgtgatcattggaattgtcactcctcgctgattcatggcctgaataaaaattaatacccgattttcatgatcgaaactgggaactcacatcccgatatccaggatcgaaaactgcgggaaatatatccgcgaagctcttgatcgtggatttttgtgagacactaaccgtgggatctttgatcgagttggaaatgattagtctttggattccaagatcgaacagtcggaagagttcttcgcttgatggtgatctttttccagatatgcgaacagtctgttgtctaacagctgcgtaggaattctcgtcatgcattggcagtaggattttggtttctaccatttcctctaacacatgaggactcgagacaaccgatgttccttgtccaagaagactaacctccaacacggaacagtcctcggcttgtgatacatctttggcttgaaagcgatactccagccgaacgtcaatcgaagccaaggtagctactggtacaccagggggaggacgcgcatctgggggattggtcatcgaaccaggcaaagtccgacccgttgtgtggttccgtgctagacaccctctgtgcataccaagttggaggaagtggaaaccagaagtttcaatacaatatctcttgagctcaactgaaaatccgagatccgaccagatctgaagcaaggaagtcagtctccaatttgagaaatattttcccgcacacacctccatatcgcaaagtttgtctctcaacttcgagatgaatgccgctgcttcattttgatcccaatttcccccgatccagaagcgcaactcaagctctggtgcctctgttatccatatactttcaagatttgataattgtgagaggtcaattggtatttcgggagttggatgacttggcgattggttgaaatgagccgatgcggccaggcgaagctgcaactttgaatctcggattcgcaaagtggatttacccaagtcgagcgtttgtgccattgcagaagaggctcatcaccaaagcatcataccttcttttggagaccggaacagtcatttaaacgagcgatttggggattggtggggtgttggagagggatggatgcggctacagtacatggacggggcacatgactttagactctttccctgacatcgcgtgcatccaattcttaaatatcactttactttcctgacatgtatttgggttttgtaaaggctcagctgaaaagctaaattcttgttatagatcttgcttaaaatggaaattgctgctgagatctgctcacggcttaacagcaacacatctcagactggcatatgtgatccattgactcccatcttctcttgtagtcccataccggagcattcggcagatctgctctatcgcactattcttcttctcctcggtatccaagatatccagcatctgagcgccgattaatctcatgaatccttccagtccaccgttatcagaggtggtcagctccagcggttgggggttaagttcaatcatcttaacctgaaacccgacactctcaatgatcttcttcatatagacgtcggacggataaaaccaggggcacatagcttccgccgtctcgattggaactccatggttgacaagggcgaacatgaatgctgtgaccttttctggtgcatttccatgtccgcacatctcaaagaagaacgtacctccgggcttcattgattgaaagatattttccaatgtggagatacgggtagatgggtctttcaagatccaatggaatgcagcattggaagtgctaaaattgtatcagcagggttctacaggaagtggaaacacggatactaacactttatcccagtttccattcataacttctgcatattcttcaaggtgccgacaatcgacaacgcggaaatcggtggtcgttccaccgtagtccaatgtcttggccgtgttgatcatggatggggaagagtcaacgcccataacataattgaccgagggagcaaagctggtggtaaacttgccatcaccacatccaatgtctagaactctgtccgtagggttaaattctatgctttggatgagagtgtcggcaaaatgggggacaaaagaagccgcagctgcatatgtctagatttggtcagcgcagacaagacaaggcaagagttcatgaccacagacctctgtagaccaatagtcttttggaggaatctgtgtctgggtcattttcaagtgtatccaagatatatggacttcgtgcagatggttagaagaagataggagcgcttagagaacggtatatgacttatttaagagaatgtatatttctgattgatgaagcgaatcttcaggctgcaatccgctgttatccgagtgccgcatagatttctcgcgtggtcttacaagtttaattaggttgacgtggcactcatgggtaaaaaccaacaaatatggagaggcttcagctcgccacaagtcagtaccgtcaccgccacatgcatcgaaattcagaatcatgatatttgcagatctctgctttagccagccaaatcaaaggatattcacgttggtggagcaagccacacaggatgatgagctttgccttactatttttctatttctggggactcctgagacgagaggcatactttgtacaaaatgaggtttgtaagcgccaatcatgaacgattttagtttctctgtctcgggatatcattttacgccttgatcggcattacagtcccattctaagtacgatataatagggtaactactcatgtgaccagcccagcccactagagatcacttctcgatagcctctcgggtgtgactacgggaagttccgtgtggaccgagaaatagctccagcgctaaactgcgctaaactgctctcgactgggataacttggcatgcatccacaaaatatcttcagctcatggcgttcaccggtctgttccagtcgtaatctcaccacaccgacatcatgcataagcctgggcagtatcaaaatccatcagtacgtgaatacacagtagccggcagatacggccgagccagccactttcaatgcaggcagtcaccgccacatatagtgaggttaatttagctgacaacgccccgagcaattaaacgtaggcagtcaaccaggtcatgactaatttttcgctatcagtgtattgatattaatgccgatcagcatagtagaactttatttaaaccccggctacattcaattcagctagccactgaaatagtaaatggggcaacctattgacagaattatcgtttgcagctggtagggcctcggctgagatttccgcggaagatggcccgggagataggttttagcccatccgcagagttcatagactcgatttaccgctgatgtatatatccgtcctttgatatcctaatccatccttagattctcagaatctgccagcatgactatcgaagtaatgtcccatgagccatcccctatcaaactcgcctccctcgcatccaccatcaacgaagcaattttgcaatactcacacgctgagtctgagtcagagagaatatcagctttaaaaagcatcgatgtgacctcccagaagcttgcacaatgcgcagtggaaccgagacggtctctgatggcgtttcacttccaaccccataaggttctttgcgtgaggctggccatcgagatgcgcctttttgataaccttccaacctccgctcctttcacggttgagcacctagcaaagcaagcaggaacagacttggaatttactagtcgcattgcccgcgccttaggagcattgaacatcttcgaggaggttggagaggatacattcaagcagaccgccttgtctcaagaatggaacgacaagttcatgcagtcatataccagacactcatgggataatgttttcagacccatgtcttcatacattgagttcttcaacaccacgggtttcgtgagcccctctgaccgactgaacacgcctttcgcatttgcgaagggggccaaaaatgtggattttttttctctgctacaacaagatcccaaagctgcaacaatatttaatgaagcgatgacaagcttcaaagaccccctaggtgacttatacaacttcagcagccttcaagtcgaagaggatggagtcgttctagttgatattggcggtggaaaaggccaaagcatccagagcatacaatcctcatatccaaacctcaaagggcgatatgtcctccaggatctaccagcggtgattgcagctggagatagggtgtgttcgcccgaagtcgaagtgcaaccttacaacttttttgaagaggtgcagcccatcaaaggtagatagacagagttatatttggacttgatatgatatttgcttatacctgttatttaggtgctgcggcatatctactcaagctcatattacatgactggcaagatgcagagtgcagaacgattctccgaaacttagctccggcaatgaggggttacaaatcgaagcttctcatttgcgatattgtcctgacagatactcggccagacacacaaaaggttctttatgacatcaacatgtttttcatggctggtaaagagcgcagtgtgaagcaatggcatgctctcatggaagggactggattccggattgaaagaattattgggctggataaccctgttcgcagtatcattgaggttgtgttagatgggtagtcattgtttttctacttttctgaatgaatgagaaaagggtcctttgtatatatactgcagatactgtctaatttttcttgtgccatggactgtgccttttaagcctaagaatattgtatagagtatactggcttaggatggaacctaagccagtatactctataaagaggaccacaatcccaccccactccatggtaaacctaccaataaagttcaagttgaagcctaatggtacttggactttccccggacacttaagcagctagaaacttaccacggtctagtagggtatctccgtaccaaaaatttggcgacccgcttagataggcagagctatatacgataggaagacggagctgcttaaagctagaccaaccaaggggtcctaaagggaagctttcttactaaggatactagtcgaaaacctgacgagtactgagaaagctagcttcgataatctctaagctgcgatacaatacgccctcgttcatatgatagacttcttcgaccccctcagacaactttacgccgagaccgatagttctaaggacgaaggccacagcgtaatgatcttccacgtgaagaaaggctgggcctacaccgacacgagaaaaccccctctagccaacttagtcgagccgatcatgttcctaagccgactcctctcctctgccgagtagaactactggccgaccgagctagaagtagcctacctagtcggggtactacaaaaattaaggcacctgctcctcgctgtgccagccgaccatagcgctacggtcaacatcgccgtaaacaccaatttacgctcagcggcgacagagaaccaaaatctccgtttggtcagggcagcccaatttatccagacattcagcttgaaggtctaccacagatccgaagcaacgaacaaagtggcggacgccctctccagactccggagcgaggacaacgatttagacagctttccgcagggcatcgatgctttcccggcaacaacccaggaaggcgaagaagaaccatcaagctccggaacaaacagtacggtcttcacggaactttctaacgagttgaaagaaaaaatccaatccgggtaccaagccgactccagatgggacaaagtcattcaaactctacaggaggaggaagcctccgcagatccgatatccaccaaaaactgccgtacagactagacgacaacgggttgttatatctcacacataacgacggaaccgaagccctctgtctcccaaaatccatgacaaaggacattttcagcttggttcacgaccacaaagcccgccaatgctatgacagctgctggcagagaatgaaggggttctggaattagggcctatctgagatcctgagctggttttgactcgttctaggctggggattctgttgcgcgggggcaagctgctgttgctgctgcttggcttggtactggttttggtaatgaccttgttgccaggtttgccgctgttgattttgccatcttggtggaggtaggtggagatgggtctggggttggctgggagcgaatggttacgcgtggcctgccgatgtggaggactgcttctcgacggtgatgtttggggttgcacgggtggcgttcattgggtctgtgtgctggtgtcgtctatgaagccgcgagtagagaggaagcggtccatctgaatgtccctttagacagcagccaacgcatcaacttgatcctgagtaattgtcccatccccaacaaggcgctgcagaatctcatggcaaaatctttggcagttattgacaacaagatcaaaggggcggttctccgccgctgcaatgcacagcgcgtcaagttcgtcgtcggtgagattaagcccagtggcgatttcaactgaggcttcaagtgaacgcgaggttgctgggtttatgttatccatcggctcgtaagactgagccttttttcagtatattggagtttgagaataagatataagtgcataccgtcgtcccgctcagcagggaagccttactcgcatgaaaaagggttccggtcgctgctggggcatcccagagaaagctgcacaaatattagaattagaattattcaatattgctccaagcttgagacttacagagcccaatgagccgtgtcctcggggaaccagcgggattgattgaagcacaacagagttgatgttcttgtcatgacaatctagcgagctttgtcttgttgagcagttaatcgcgtgatacgtgtaagacggaagattgttcagaagtttggtagagaagagacgcgtcaagaggaagaatggatggggacaacttgtaagtaggagggtcacgtagctgggactgactagagcttggagttgtttgtgtccatctgtccaaggctttgatatgtgccttcactgtcacaattattttgccaagttcgaattttgctggcctccaaagctatagtttgatattattaagatacaaaactattcctagttgatacaatttcctagagtgttgcagttttcaatccaaatacaatatgggccgagtttatgctttggcctttcatgattgggactcgttccttccctttcgggctcgcgagtcacttgctccttccctctcgagggaagtcgttccttccttgacagtaagcgagcaggctttgccatgggggtataaaatgtataaaattcccgccgtagctctgcgttctgttctcttttctttttcttctctacgtttagtatttcgttagaatgtactctttcttatcgaattgacctgatacgtaacatactccaagccttacagtacccgagattaatatgagctgatttggaaagaaaaatagcaaaagatgacaaaaacggactaagctttttatcaaattactggctctatatgcgttggttgattctcccctagaacatcttccttcattactgctatcctttatcctaaaacgaatatggtttcctcagctatagaacaatttcaaagcctctgggctgagagagcgctgcaacattaccgggatctctccatcaacttagacaagcgcccttataaactagccctcccctagggccacactggacaggatcgtggccacgggccatgaggactttgcccaataccatgagctgttcagacatgaaaacgctaagctggagtagtcgtgctgcgtggtgttttagtcagtttgtataatagtatgagcttagctaccagccaggcgattccgcttcgcccaagttcacccaaaggacagagtttttgtttgagatgtaactaagcgctcgttctctgagtctacgcatacattaacgctaattctaaattccatattattataagaagcgatacgtgcgactttctgatcgaaattcaatataaatccctcaggcccaaggacgtcaatgccagccgggagcttggcttcgagatcttggacgagataggcctcaattgtcagtttggctgttgcctgtggacctatgaagtagacgtccaactctatccactcgttcgatatatattgggattttatgccgctgaccgaaattggttttggcagcattgtgactagggtatctatcttttgagctaccctgagtcgataagagtcatcacgcatccggaacctaaataagctgtaatgcattgatcctaaagctactgtagccgtcgcatacctccaggcacgaaaagcgtatcctgggctatgggctttgacgcggttagactcatacaaggggagggagccgtcaaacaaagctggggctacttctaaggtcgtcccagcggccggcgacttacagccgtatagatttttatagagatcattaccagattcgaagctaaagtcacaattcaaacaggtaacagagagctgggggtggcaaagctgtgccgtcgcccgtaatatagccccggatcaacttcacgttccgggacgggaccctgcggcgcgtggtctggtttgcatgtgacttccttctgacgttaaatagcaactactacttctccttctcctaagaatcaacatcctcttcatttaacaaacttcaactcacataatcatgcttgcccgtcttaaaaacatattcaccccctccaccaatccttccgtacttcttgttgttggcaagtttggtgctagaatccatgttcttcatcttatacccgaggacggcaccatcgaacgcttttgcctcgtaatgccatcttcgtttactaccttccgctaccgtggagccagagagctatcgcgcgagcagatcggcacagtcacgcttgacgttggagatggtgtgattggtaataccttcctcgacgacgttaagacacgaatctacaagctacagaatgattccctaagctcgagcccggcgcagctacagacaggcagtactgaggtaactcagctcgtgcaagacgtccttcggcccgtagcactcgatgcgattcatgaaagagaggggcgagatcgctctatgcgcgcgacagagacgtaccctgtttttattatttacatcacacgcagcccagggaggagttttcttgagatgacaagctatccttaatgagattccatcatgaaagagaggcgagatcgctctataagcgcgacacagacttaccctgtttttgttgtttacatcatacgcccgagcgcagggagactgactgagctgacaagctatccttaatgagattccaccagttcttttgctcaatatatgaatagtagttgtagtgatttgaaataacattatatgcatcacagcaatatattggcacaatttttattttgtatgtggcttgcttttttacaattctgtatgaatagaagtagttgagcatgtaggtagtgcagctagtcaatagagtaatagcatgcaatacttagtctctatatcaataaccattgaagccttgacaatgaatagttctcgtactcaatgaactatgaggcagaactagtcttttgtgaaacatctgataggccggtttcaaaagtccatttgcagttattgtcgtatccctgcgcgattctctcaacatcgacgacagcatcccacgccgccaacgtcctcctatatcgttcctctccatcctcgacattgacagcgtccaggtcttcctggcgcccagcatcgcactcgcagcgcaaaacagacctcagcacgtctagcagttccctcctccacccaggttgatggcccccggacagccgtgccgcgacgtactcatagtacgcgggcatgatgttggccatctcccagtccaggaaacccgtcaccgcgagtgtgcacgggtccacgaggatgttccggtcagacaagtccccatgcgagaggacaggacggtcccaatcacctgggccggtggtgtcacgctgtactcgctcaagggcgactgcacgttccgcgtccgggtcagaggcctgcagcgcgcggacgcgcgagtcatcccactctgagcgggaggcgcaacatacatacgtctctgtgccaaattcggagaagaggacgtacggctgccgcgtaggccggccgtagtaagaaaagtggtgcgtacgcatacgcacgaggagacggcagagctccgccttgatggtctggcgctgtagaagggtgagagagggccagagctcgactagcggcgtgcctggctggcgaatgagaacgacgccctgttggatgcggttgggcgtcaaggcgttggaggttattatcggaatcgtgacgacacaaatgacgcgtgggacacagaggcccaagatggaatgggcgagcgcggtcatcttgccttcgccatcgtcagcgcccagtttgaggatggtagagggagaatgaataaaaaactgccgtccaatatttagaatagtcggcgctgagaacagagggaggctggggagaaaggcccagttctcccgaggaagctgctctggttcctgagagctctcgccatctagtgtcattttgagcggcgatgcgtggggagaagtccagagtatcaggcaatattaagggtttacttagttaagtaacctggtgctaaagtgcgatgtcctctaagataattgattgattgcggagcgagcgaagcaagtataaatcacaacgtcctatgtacgtacgtatcacgtggctaaattacttatctaggcccttctacgcatcacaccagactaataatgaagacaagagttctttctcggttgtagcatttgtcttgtatatattcttatacaatagcgacagtcattcattcacgactatctccagccaacagattgatttcttgccgtacgaagcaatcccacgaggaattgactgtctagcaatattcaacccaggcatcgaggttcatgttcttgatgacagtcgagaacttgccggcgttggctgcgttgcaggctgatgtcttcaacgtagaggagagaacggctctagctcggagcttgtggtgaccgtgtccgtgcccgtgtcggtgttttttctccttagtggcatcggtgctagcctcttcctcgtcgtcttcgcgttcgtcatcttcatcgtcttcgtcgtcgtcttcgtcatcatcgttagtgtccgcatcagtgctgctagtattggtgtcatcggcggctgtgctggttgcagcggcagcggcagccgaggtagaagaaggtatgacagcaacagtggctgttgcagaggcagcggcagctgaggtagaagaagggatgacagcgatagtggcagtggcagtggcggtagacttgctatcagtggaagtcttggtggcagtatcagaagtatcgtcagagccgtccgactcaatagtctcgtcggaatattcaatatggaaaacagactcatatcttatcaatagatgaattgccgcaggactgctcgttgtatgatgctatcctaagccgcctactattcatgttcgtcgacgtgatttgctgttttgcagatgatcttggaggccttgatgccgtacgtgatatcttatcagtatgggtgcgtatcggatcggggtcttcacgctacaagcttgtttatcatctaggaaagtggctatatcggcaagtgagatcaaggcaggtacaccgtttatattctcatattataacggcgcagcaccccacagagtccaatcaggtctgttatctaaaattgttctcattaagctaaaaattatactaggatctttatagcatacggtaggcttagacctgacagcgagagtgaaccatttgtctagtaagtaaggtaggacacaggttcggaaggctacgaaatctagaaaagcacagatcataagagagaggttgaagagatgtgcgactagaactatattagcgtggatccctgaatcatcacgccaactcgggccacacgcaacaaaatgtcccctaggttggcaagtattgcgccttagtatctgagaacataagaaccataagctgtactaccctaatataacttagttagatcttatattaaagtggattcagaatggaaaatcacctcagaggcactgggtaattagctgtgaaatttctggttccacttgcaataataaaggactatcccggtcagtgaacgacctctctagggctacatagcagctatagagaatgggtataatatataatcttatttggtttcctccatttcatttgcagcacattaaaagatctttgccgctccctagtaatatgggtattgaatattaaggttaagttctcccaggtcttgtggcagtaagcttgatgggggaagaagatgatactattatgacccctctggtgggggtgccatggctaaactatgactaagcaggctaggcctgtgacaggtcttatatggaaattgagcgcggagtgagactagtaagctcacctcagaaggtgaccattttattataactttaggaggaaactggttagaacttatcgttaaagtacctaggtaggcgcccttgattataaatcgctggactcgttataggtatctgtacagtcaaggtaccagtaaaggaaaccttcgataactctgagagttatattcttcagctagtattaagggtctagtgggataaggcgttagataaaactatattattagtaatagctgggagaaaatctaataaagcaagattaactaggataaacctactttttgaagttgcgatctatatatcctgtcacgattggcacttgcgggactcgtactttcccgtttgggattgtaccgttggtcgtttgcgcaggcagtcgcaccttccttctgggggaaacgagaatagggctttgtccctaaaggggtataaaagcctatttgttgttttcacgtttgtttcttttcttttccttttccatacttgatattcgattagaaatgcacttcttttgttaaaaggaatctggcacgcaannnnnnnnnnnnnnnnnnnnnnnnnnnnnnnnnnnnnntctttccttcccgttcgaaggaactcatttgcgcagacagtcgtaccttccttctgggagaagcgaggatagggctttgtccccgaagggatataaagacccatttgttgttttgcgtttgttttcttttcttttctttcttcatacttgatattcggttagcaatgcacttcttctgctagaaataacctggcacgtaacatatcctacggatttcagtatagaatcggtaaaatccgcgttaacttccggatcttcttattagatgaataacatccaatcggttttattaagcttagcttcacttttcttcggcattttgccggtagtatagttcaatgttattagaaagtagaacggccacgccgaagatatggaattgtttagggatgatatctgaacgaggacttagactgcctttatatcttttatccataatgtacgcgctgagggcgttgatgtatgatgaatacttactcctgtaagggcgctaaacctaatagtattatattcaatgctctaacgtgagcgctaggtgaaaggaccacgatttcccctcgaaagaccacacacaaatgttgtcttttcgccgtcaccccgacttactccatactatacagtggagtacccgtgacgtgcatatggtgaacctcggaaccgcggtttaaccgccgttatctcttatcgtactcccctatcgacaatctgtcacgtgtggccttaatccaggtggcctgaaagtaaccgttacacttccaactatctacgctcagcgatgccaggggatgagttgtcagaggatcacctgtatgcccggaatggccgggatgaacatgaagcccaatccctcctgtctgcttcaagcgaggagcatgacctagctctccatccggagcctcttccgtcgccgatcccctcacataacgcgacaagtagcatatcccactccgcgatttctcaacctgcaaccgacggaaagcgccgtacaccccgtaccatgaaccgagttcgattcgacctggacgaagaacctgaaaacaatcgcatttccattgagcgtactctcagcccggacgacagtccagatgacacactatggctggaggacgaggactatgaacttggaaaccgaggcccagggacacaccacagtggacaatcaattcctcttctcacaaatatcgaagcgcctagtgtgacacttgcaacgtcggacgatttcttccccgaagatcatctcgaaaatgcgcggccgcggagtgggatgaaaatggcgttcatgaacatggccaacagcattatcggcgctgggattattgggcaaccttacgcgctccgtcaagcaggcatggcgatgggaattgtgctgctgactgccttgaccgtcacagtggactggactattcgattgattgtggtcaactctaaattgagtggggcggattcctttcaggcaactatgcagcattgcttcgggaagagtggtctcatcgcgatctcagttgcacagtgggcatttgcattcggtggcatggtcgcattttgcattattgttggcgataccattccacacgttctaggcgctttatttccgtctcttaaggatatggccttcctctggcttttcacagaccgcagggcggttatcgttattttcgttttggtagtttcatacccattgtccttgtatagagacattgctaaggtcagctcgttccttccttactatttatcatagactaacagtcagatagctggcaaaagcatccgccttggcatttgttagcatgatagtcattgtcgtcacagtcatcacccagggctttcgggtcccgcctgaatcgcgtggagagatcaaaagccacctcgtattcaacactggcttttttcaggctgtcggggtcatttcttttggtaagttttagctgccctgtcaatacttggaaagcttctaacaatttccagctttcgtttgtcgtatgttcctttttatcctactgatatcccaaccactaatttccacagaccacaacagtcttctgatctatggctcactgaaaaagccgacactcgaccgtttcgcccgagtcacacattactcgacaggaatatctctggtgatgtgtctagcaatgggtatcgcagggtttctgtcgttcgggtctaaaacccagggcaacgttctgaacaacttcccatcagacaatatcgttgtcaatatcgcacgattgtacaatcttcccattgatattgatatagagattcttgactgacttctattagctgctttggcttgaacatgttgaccacgctaccgctcgaggcgttcgtctgccgttccgtcatgacaacctactatttccccgacgaaccacacaacacggttcggcatattatcttcacaacggcgctggtggtgacttcgatggtgttgtccttgataacctgcgatctgggaagtgtatttgagctcattggcgcgactagtgctgctgctctggcttatatattccctcctctctgttacatcaagcttagcagtgctacgcggcgagagaagatcccagcatacctatgtatttgttttggtgtgcttgtgatgggtgtcagtgtagtgcaggcggtcatcaagatcattcgaagtaagtgtgtcccggaagatggttgcaattggacccagttgatagctatttggtcgcatcctccgcaaatatactaacattgaaatttgcagatgatggcgaggcccatagttgcagtgcacgttagagggaagggattcctcaaggactttccacagatagcggcgacttgtactctcggtgtgctcgaaaagcctcttggagccgtgttgctatgtatatatgtatccattttgaacaaatagctgtttcctatcataccctacaacattctccttcacaaatggctacgtgccgtttttatgtagaaatggattgcgacgtctcaagatagctagcaggtagtttgatggatactgtgtgcccaggtgagcagtatgtatatactgtgcagttagactaagtacggtgaagtatattctaggcacgtgcactttgtgatttaggtatcgcaatccgtctgcttcgtttctcattttctactactccgctcactctctacatccccaaacaccacgatgattattaatgtcattctaacgtatatctataggactttactatgacgtgtatacgtgactcgcacgtggccatctcgcacgtggccatgccagatcctaaggccaaaagacttccacagaaggtgcgatggacaatccgcgcaacatcaagaacacactatgcagcctcgttgctacccaaaggagcgataccctcatatgtttgtgcgttcacgcatgcgtctttgatccaactggctctgatcgttcctttatttacctccctgccgtcttctctctttcttccttctacaaccactctctccctgtttttctcttcacttcttctctcgtctggagcggctctcacagttctcatctcgggtgctttgctcaaatctgcttgtccgtctctgtttctttcgctccacagagtcccaagtcctcggagtatccccattggtcgcctgtcccttagggaccttgcttgtgcttctcaagcttcattttatctttgtccttctttcgaagcctccaaggttgctttgacctgcagggacgttctctctgggatacaccatcgcccacgctttaaccttccctcccactcactcctctcttaccttcgcgctttggccaaccgaggcatagtactaagccggtaacacgttgacaacgacgtgtcgcataagtgcatctaatatcctcattaccgttgttcacatttcacccgccacgggaagtgcaccggcaagatgagcgagtccgcggagcagctccgccagatgcaactgcttcaaatggtaatatctagcctctcactcctatctagcttccctaactgactgaatcaataggcggacctaggaaccgctcggcgtgaaatgatttccacagacgagatcaggaaacaggctcgtgtccacattgccgatatcgaatccaagcgacggcttgatcagagagatgaagctcaattgagcaaatgggcaagtaagtactgagaaagaaacgcccttgagcccctctaggattttactaatctttgtcgcagatttgcatgctgagatcggagatactagtggaatggaggaactcgatgacatagaatgcggccagtcccaccgagctaatttgcacgcgatgttgcaccccagtggaggtcagccgcaaacctacgcaaaccacctttacccaactccatctgcaggtcgcggtggtggtgttatgggaaagagaggacgaggtggttttgctcctctccccaggggacctactaatcttcccccaatccctccaaggtaagaaattgatttaccccgacatttcagacatccaaattgacggtgaataactcgcagaccctcctttcatggaaatgttacacttccaggactcccaggaccgcgcggtcgctcggctacaatgtcggccagcattcatttggaccctgcgttaaactgcaacaacgatgacagcgatgctcgagatcgaggaaggggacgtgggcgaggcagaggcagaggaaggggcaacgcccaagaacaggttcacagtacgttttgatcacgggtacagaaatagaacacagctaacaatattcttagtgccgccttccgccatcaggcctcatcgggcatctccagcgtaagtgatccggcttctttctcttggtgagattaagatgctaacttcttggccagcgtcaacttcgccactaaaatctctgagcccggggacttcatgtccttatttcagtcccgccgggcaactgaaacgtacaagaagcctaccgatacaatcgtctctgctccaattccgaagactacatcttcgcaggaatccattccacccaatgtgccaagggtgaaaatgcctccgagcgatacacccaagaagaaaaaggcgagcattcttccagttgcgaagcctgcatcatcgccagtggcaacatcgacaacgccatctcgggttgttcctattgagacgactacatcgttccaaccctccacggcccaggctactactggaaccaagaaatctcagccacatattggaccctatgaggtggagacgccctcacggtcagcccgtgttgttcctcttgagaggaccgcatccttcaaaacccgcaaggcccagcctgatacacccaaatcttctcagccacgtaataaactccctccagtggaagaacccaccccacccccaccccattcggtttctgtttctgtcaaacaaggcggcaagcccaaaaaggcgaaacacatggtgacggattctcagcctcttccagcaatggtcgcaactgccacggataaaattcaatggaaggttttgcctggcgaggagccacgaaagaagagcacggctcctccaagcaagacggcagtctcattggaaaactctatgcccctcgctgaggccaagaagacacccgtcaccaaggtcactcaactcaaagacagcaagcagaatgttcagatggaggaaaccaagcataaaccccaatctcatgatcttcttagcgatgacactccggttatgacaacccctcgccatttcaatacagtggccatcaagccacccgtcgtcaaggtcactcgactcaaagacagcaagcagaatgttcagatggaggaaaccaagcataaaccccaatatcatgatcttcttagcgacgatgacgccccggtcaattcaacaatgataacccctcaccatatgaacacaatggccgtccacagtccaggtgctgcagaattggcaggtctgaagtttgccgagaaggtcggagagtcggtgccatccaagagcattgacggagtcattgcccctaaaacaacgatcaatgattcaagtcgagaacttgacggcttcggtctatatggtccgaaaattattgaagaacttcgcgacattcgcaaacacattcgttcgccccaagagttggctactgcacatgatatcgaacgcatactggaatctaaattgcttcagttgattcctgaagcacctccaccgcctacagcacctgcatcatcggatatagaaggtcggctggggaatctgcttgcacttgtggaatatctttccgcatcgcagcaaggaactaacgctgttgaaatttcttcgactgcccggcgcgatattactccatttgaggggcaccgatcgccgcctcccccttcgtctagttcaaactcacccccgtctgccgataaacgcgcgcgcaaggtacatgtgcccggcctctcgccaaccaatagtgagagttccgacgtaatttcacagttcgagactcttcaggtttcggacaaactcgccgcgcccctccaaccgcagcgtgtggtcccagtcccagctcttcgtccgctgagaattccgaagaaggctactacatccgatatgtccgttcaggctactcctgctctgggatcacgtgcaaaggaatcaacgaaaaagccacagactctgaacgattcgatctttgcaggatctgtaccccttgtcactcccaatgctaacgttattgaacctaatgcggtgcgttcccagaccactggtcgggtgttgagcgcaaaccatccaaacattcccaagcaccaggatttccaggcaacgggcgctcgtacaatcggccctgcgccatacaaaccccgcgtgattggacctgcaccctctgcctatgagccaaccacgttgcgcgatgtgccaacagcccacattcgtactgtttccgttcagcatgctaacactgagaatcggccctccttggatgttgcaaaccgtgcttcgacctccatgggttacttcaatggcccagcttcccagcaagctccgggtgaactgttctccatgcctgaccctgcgacgattctccagcccaaagcgaaggcggctggtttcttcacttccaaccaatctcgccgctaactagttaatggcttctgttttccagagtctgagtttcagtggatttcttcttctactagcctcagccagctctgatcatctatggtctctacttcagtttcattttcgtcttttctatggccttgttgagctttgagatctttgctttccctggctgaatggttcctatttcagttgttcaattgttcaaaagcgaaaggtcaatgatcgtttaacgggtcttgcgtgattatcagatagttgaagctctaatcaactaattgttgtttttttcatcacttgatgtgaatgtaggtagttcattagggatatgagccgttgagtcagacatgcaataatgcagaggaagaaagtaaagtgctgtaaacatgacctatcactacgtaggtactctatcatcatacagcgcaaaattacctcgctacaaagaaaagaaaaagcaaacacgtttcagattaaacatccgcctagactattgcacccaacccgaaataaagaagacctacttccgaggtggacaagttcggtatatccgatctgcattagtcggggaacatgcctcccgttccggtcatttctaggacttttgcactcgaacagacctgtcacagtactttctttttcttctttcttttctttttgatgcactgctcctcaatgcagacacagcggtcaggaacggaacccggaagttcaatcggggaagacaaagcgacatccggtgcaaagtacataatggccaaagtacataatggccaaagtacgtaacggtatatattgatatcgacatgtagacttgacgaggtgtgatttgcacggtctttaaagaactagcctttgctatttgtgatatgttgaacttgtagtatggctctatagcatgacgtatcaaaatcctagggttgattctataatggcatatagatggtcttgtggagatctagttataccctgtcaccgaattatcccatctagatatcttaactcaattggattcagtcaggcacggctctgatgggttggatataagattacttgccttcgaagctatatgatccacgcctatacggctgctgtacatcttggccatatgatcttttccaagtagggatgttgatcatgattccctagagagattacgttagaaaatatcatcaaattttactagagcctcttacttgtgtaactgtcgagtctgtggtatgccctcgctctcgatgaaccctggagtatagaaaaacagaggccagagcgaagaagacgagactgagaccggcagcaatagtgtttgctgctcgaaaaccggtccaggtaagaccaatcaaggaagtcatctttactcgaatagtatccatgagcagtgtagtttgacaatgaagagcgatattatgtctcgataaacgtggattcattcttctttaaatatactcccatcatgatatgtgacaatcaccttcgcacaagtaacaagtcagtagccctagtctactactacccatctcggacagtgcaggatatcaatatcctccaggcaccacaaaagcaagaagccggagcatagacgccgatcagtcaactcgtggcctctaccgatcatcactcggagtgtgtaatgcaaagaagaaaagaaaaacaacattaataaaaacaaattgcaaaaagcaaagaaagtaaaaaaaagcaaaaataccaaatcgcgccgcatccttgagaaattatgccggctagaattccaccgtcctgcaggcaccgccaagaaaatcgagaactgttcattgggccttagaccttgtgtttcctgagctgatgcaccaatccgttaatgccagcgtaccgacaacgcgggctatgggaactgctatccggtgccgcgggctggcccttacccatgcacatatatatgcataggggaacacccgggtgtttcttgtggttcgtgtctatcagggtctagatacttgctgtcatctgcgattggttctggattcgttcgggactttcccgctagccttcgaagcacggcgggagtagggacagaaggtcccggtagacgttctggttctgcttgcctttggcatcaggcttagggccagattttccaatccctgttcgtaattttgtatcgaaatgatgtcaattttgttatgattggtatttctgcggatcaacataagcctgtggtctaagcctgccattgtgttcctgaagtcctgcatgctccagattcggtttaggataacaaaatagaatatgctaatgtgaaggaatgtatcgataatcagtatccccgtccggtttccccgaataggatcctgtgggtccatttgcttcgaagactccggaaggcctgtcatacttccccgccgtgataaccatattatggcgccgtaggccagaggtgaagctaaaacgaaatttcgatgaaataggaacgcttgtagttgaaattgcgcattgatgcactctctcgggtccgaaagacaaatcagatcatgttcattactgggctagtgggcgaggcccagaagaaggcccagggtcagcacctgagactcgaggccgttttgggtcgtttggacccagtgccgggaccccttgatgtgcgccagctgttccatcggcattggtgacgtccactaatggaggccgttttccgttgaggttattctggggtggcatactgcctcggttcatcatggcagggttggaaacgttcctttggtcaaggttgggccgggtcaatggtcgatacgatgagacagaagggcctctgccgaccggactgctaaccccaccaccaggagcaccgattctgcgctgcagatccgttgcgggattgacaaaatcgcgtgttgcattatttttattaatggtgggtgctggggaggcgctcgacagcatcggcctaggaataggaatgcttttgctgtggtctacaccagcggttttgcggatggagggactctcagcatgtggatcgaattgaggtacgcccgacgggacggagtttggattttcacggagaaggtccactgctcttgcagaaaagaaacccgttgacggtgtgccttgcggtggtgggttcatgtcctcggttttctgaaagccgccggggccggtttccttttgagtcggaggctggacgatgtttttgtgtggaggatgctgaccaactggttgctgtggtgggactgatggtctagggttcgcaagattttgagcaggaccttgagcggccattggtcgaccttgtaccgcagctggagacggcatagtagattggttctgtcgcacatttgagggattaggtcgtcctgcttggcccgcgccgttccatcgctctggttttgatggtgttacaacagcggggttaaatcctgctcgaacaggcggtcctcgctgaggcgctggaccgttcgttggcacggtacgctgctgttctcgaagaatctctgtgtctattacgatctcatcaggattgcccatatcggtatcagctaccccgaaatcggcttcatcaaagaggtcacctaaaaatcattagccggagttcaaccttatgtattctaatacatactgccaaactctccatctccatcaaaagaaacattattcccagaattatttcctctcgcttgatgtggcggaccagggaggggtagatcatcctcttcgggtacttgcttgggtggaggcagcggtttcttaagtggcgcgaagtccgggtgacggtggagattttcaacgtcccatcgtccctattttgatagtcagctggcacatcgcaagttggaggacatcggggaccttacaggcgctgccttgactttggtcaccttggccacataatctttgtcatagatacagttacctagcacgttgccaaagttcctcaatgcacgtttcaaagcatctgttgtgccttctttcttggccttctcaaacgctgcggccttgcctttgcagttctcgatatgtccgtagccaatatcctagaagagggctggagttagcacaaggcccacgagaattcatatcacgaatatgttcctttacctcatgaaatgttccatctctcaaggtcactctcatgatgactgaaagtcccaggctgatcttgcctgtgttctgattttcctcaacctgataagcgttagtcaatccctatgtgatgtagttgataaacataagatcaacgcacaaaatcaatctgaatcgtctgaatcgaactggaccagccattgaatccaaacacttcattcgcgagattaatgcatttgtccgcggagagatagtgcactttttgccccgctgcaccaggtcgcgcagagatgtattcgggtcccaatttcttatcaagacgcgcttgtagtgttgcaatttcctgtgcggtgtattcactgatgcggcgttggggttcctcaaatgggtttgctttagcggctcctgtagcgttcggcatcattatagatcctgcattaccccgatgctggtcaccaacgctgagattatcactatcagtgctcggttccatggggtatagtatttcgggtccggggtattggtctcacgctggcatgttttgttgtgaatgagtgtcgagtttgatattagagatgtactggcgtgtcgggcgcgttgtcttgaggcaccaggacgcggctcatcgcgatatcacatgatgataacgcgataagataaagattagagcttcagtaaacaaaacactgataattgatattaaggatagttggagattattaggtatgtggttcacatatggaagctaccattcggggtttcatcatttctcattctttgcaaaagctatctatcccttcggatgaggaagggtatgccataaatcattggatgacgagactggcactgggcacaagtcctagttccttcaaagtctcgccgaaaaactcattatcaaatatcttcttggggaaagtctgcacgaagctctggacctcgatcccatcctgttccctcaatgcggccgcaacctcaaacaacgtggtgtcgacgggcaatgtcttcatgacgttacccttggatgactggaatcgcagtcgagtttcggtataggcagaggcaggtttagacgtagtgggaccggaggaagtgggtgctggagcggcagcaggctggggaggaggagccacaccggcacgctcagctcgctgcttctcggccttcaatcgacgctcctccttgtcggcctcgattttcgccttgatacgttttttggcatcgatttcatcctgcttctccttcttcttcttggctgcctccttcaactgttgcttccgctcgagttcctccttagcatcttgactttccttggtgctcttccttcggatttcctaataataaaagtgagcaaaatacctcaatcgaccaaaatcaggaatacacacctcattcttcttcttgtcaatcttgtcctggtccgagagccctgcgcgcttcgccgcaagcttctcccgcagctctgtcagtctctgcttcttctgctcctctgtcaagggagcaatctcctccgtagactcagcaaaatcaacatgtcccgactttgatgcgtggaactcggcctgtgactggcctcggaacttcttgccacactcgttgcatactaagctgcgtggttgttcgcctggttgaagcgcagggttctcttcgtcttgtgctgctttcgtttgtgccttaatctcctccaatgacttgtcttggttgtcctcaagccactgtagtgcaccttgcactgttaagtcagttagcagatacccaactatagatactggggaaacaaaaacttacagccaccagtcttcgtcactgcgagctgggcgcgctccttgtcaaagcccatttcaatgagctgatccaagtccgatgccatgacggctgttgggacgtgataaagatgtaaatgtaaatgtaggacgcgctcgaaaaatgagcgcaatttggcaagattgaatcagataggtggttcagatgtgagttaggtcgcgagaacagagtgggtgacgtatcagaaaggcggcgagcgataaggcccacttaccttccccgggtttctatggcatcaagttcttcttgatggcgtgttttgagggatagttcgatacttgtacgccattgaaagggtgataatgccaatttcatgtttctatgatattttcgacttgtactacctatgcacacgtgtcgtagttatctatttaaatttaggtggctgtgtggcttatagagccgaataaacatgcaacttgaatatagtgttgtgcaagatgtatgtatttggcgaaaaccttcaagtaacatataaaatgtaaaatcaggctaaacggaatacgaacatgtatatatagggagggactagcatcatataaaccgaaagatatatctgctaaggatgcgtgtgctacgagataactgcattgaagacattttatatattactatatttcagcctccgagacagaagatatagactacaatatgttagcaagtgacgtctattaacatacgaggtcgaagccagcgccaagggatatgatcgcatacctcaatagcatagctccatgcatggcaaccagggaaataaggcatatatacaggctgatcccagtagaaagttcagtgaccaatgagcaaccaatatgacgaaatatatacaatttaaacacaagtgggatttgaccccactgcaagtatcatatgcgggtgaagatgtccatctgaggatgcaaggatataagagcatattagaaaagagtggtcgaactagatatatacttctcatagccaatatgccaatagaataattaaacacgaagaaggaacttgcaatgtggttatagcctactccgtagagcttgtcaatagtgacatcacctgactgtttgctgtttgctgactcatctaatttccccgtgcctaggtggacagtaatcaaactcctgaggcatcttagacctgataactccctaacgcctttattcccaatcggaacctaatcgcgtgcaatcatccacgcccttgtcatctttgttcccttctcccacctctgtcaccccgaccacgtgcatcatgaccatccaaatcgagccctccgagttgggcttcaagcgtgagtgctagaccccgaacctgtagacctgcctagatcacatctcatcggttgataacaggtcccttcaatcatgaagtatgccaggttctccgcctgagcaacccgaatgaggaatctgtggtcttcaaggtatgtgtgacaaaccccctcccttgatctttgtcgcagtactaacatgtgtcctcggcgcactaggtcaaaaccaccgctcctaagcagtatgtcccgacgattgtctgcgcaatgcctatactcgagtttttttatctgatcatattgtagttactgtgtgcgacctaactccggccacatcgaacctggcaaaactgtcgaagtccaaggttagtcgataagcgagtacgcctgaattttgcggcgggctaatattatccacagtgttgcttcaggctatgaaagaggaccctgctccggatgccaagtgcaaggataagttcctagtgcaggccgtcccggtctcacgtggattggaggatgccagcgttggccagattgtatgtccagagtccagcatggagaacacgaagatcaataactaatattacatttagttcgaccaaactcccaagggcgacgtggttgagcgcaagattcgagttgtctacctagcaacagatgccacttcagccaacgaatcggtattctccccagcaatcacttctttatacacatagtctaactttcaccaggtgcatgatgaggaacctccatcgtacatttctcctgccggcgcaaatttccagaccccggcccccaagaagattgactccgctgaaccgtccccaattcctgctcccaatttctccgagaagaagtcccagtctccccagcgcgagccgcaatctgctatttcaactgccaggtctgccgtgggaagtgctattccctcaaccgacgaactcaagtcccagctgtccgaagccaacgcacagatccaacgactgaaagaccgacttgcggatcaaggactgcggcagcggaagaccggcggagaggctaccggtaaagctgtgcctgctaccatgcagcagtcacatgcgccaacggcgagtggagtttccatccaggctgtggcatctctctgtctgctcagcttcttgatcgcatacttcttcttctagtctggtcttctgtttctcgctttctcgcggtctatctggcttcattgcacctactctccgcgtactaaatgcctcccgtctaacgtcgccgacgcccgtcccaaattcccatctactttttgtctcttgaagagagcatgccgttttctatctgttctagcatcagcctttttatgcgtttgctttaaattcttctgccccagtatcaatactctactttcatgttgtctctctggacttcttcccttgaggccggacatatgtctgtctcatcctctttgccgttgctttcctttgttctttaccattcctgtcttgtctaatatcattttatgataaaacggacccagcctttcgattcgttcgccttgtttcataacccattctcgagctcgggataatacatgtgattgctactagagctaactccatgtcgtatgcagttcgggacgttgtctcccttcttcggtaattggttgattgaagacattcggtcctgtctttgcgcattaaatggtcttgttgacacaggcaccggacatcatctcaactgagcgtaaatctaccgagactgatgcttcgtgtttcctacaattatgaagcctgataaaagtcacaaaatgacagcctatttgattgtaaacaaatatatctaacaagtacaagtactccacccagtaatgtatgtaactgaacacctgaaaatccaaaaccaaacgttatactcaaaaagcagaacaagatctaacattgaatctcactctccttccagccttcaccctcctcgcccgccggacccgccgactcagccgagatgccctcaccaccacgtccattccattgcttagacgcagcagaatcaccaccgcgcttcgtcccaccgccaacaatccgtccaccctgttcgcgcttcacacgacaccacggaccgacatccttatccaggatgaaagtgtaaataacccaaacccagctccggtggcaaggtagcggttcatagaactccctcgcaatctcatgcagcttatgcaatcgagtccaagggatagcagggaaatcgtggtgctcgttatgcaagccgacattgtaagtgaggatattgagcgggccgtagtacgagtatgtctccgggggaggcagagagtcgagcgggtgcgggaccttcggcttctcgttctttttcagctcggtcagggactctgtaccgccgcccttcacgttcgagaagaaatagtgctccgcgatgaagtggcctgcgcaggggtgcagggatccggcgaggaatgagctcaacacgaagtatagcactggctggatggagccgcatagtttgcttagggcgtagtcgaagcttatttggatgcctaggttcaggaggtggatgtaggtgaagggtgggctgtagatgaacattgggcgcacggcgtagaagaggatctggaaggtgcagaagaatgttttgcccaggagggagtttaggaagaaggcttccactgctgtggggaggtcggtatcgagacctgttacgccgagggatttgtggtgtgtcaggtggtagggctgttagtggtgctgtgtcagttcattgtctgcgttggggcccagctagtttccggcatgtggaagagtatacgtactctgaatgctgcgctgtacggcagtccgatggggaggtttgcgaagatagcgagcaagcggttggcgaaagccgaccggaatgccaggttgtgtgagatctcatggatggcgaggaacaggttctggttgcaagttgcaccgatcacgtatgccgtgaccaggaaccgccaatcgagcattgaggtgctgcggaggagataggcacaggtgagttgtagggacacgacgccgaggacgacccatttggtaagaggctcgggaccacatagtttggtgacctataggtacatgatatcatgaatcagcattgcaattgcacttgttgagactgttcctcgcccaggaaaggtggccaggtgtatgtaggagctccgcagacctccgcatggagtcttcacccagctctcatatcaccccgagggccctcaaaacaggatcacatacctccggatgggctttaataattgcctgtcttcttgagcggtgcggttcttccgtgtatgtccagaagaaatggtcctcgaccaaagcttcgggtgcctgtattctggtagactctggttgtgttttgtcggatgccttggctgccttggttgccgacacgcggagttgcggcgaagttgtttcaacgaccgcagacatgatggaaattggtgtgtgtcgaagtttaggccatgggagatataagaggtctcaaaaaagtcggaagacagttgttccacgtggggcgacgcgatacttgatggcttgaggcttggcaggatcggcacttgtcagggcttttggtctccaatctattcaagacattactaatgagatggatctttgaagaacgctttttatttacttatgtctatgaaatacatcagtagtcgtcaccacggctaataacttccttcacgttcgggcgcaatacaatcgtctaaacaagtcagtaaacagtccgagtggagaaattcccaaaatagaaacatacatgttcatattgggcagtgtatgagcccttgatatcgcaaagaggagggtaatcctgcacaattccagaagaaaccaggttgttcaactatattcgtcagcttcggtgtctcgcattgaacttcatcgtcaacttacgcccaaaaggtacttgtcctgacccaggcggtcgatgtaccggcgacagaagggaagggtgccaaagttcttgttgatcaaatttaacaagttcttagcggaggtaagacgcaagggaacgttaggagcgtcggaggcgagagcgtagtgcgaggtttccatctgaggccatgttagccttggttctcgacctaggacctacagtataaacttacttcctctcgcacgtaacctttaccggtactaccgaaagtctcaatggcgaaaacttcaccctcttccatcttggtctgatcggtgctcttgacgattggtacactcttgccaccgtggatgacgtgctggtcaatgttgtgaccgtttaagttgcggatacacttgacagggtgcatggtgccattgagctcaacttcgtaactttccatagcttcttggatggcggcaccgatatcactcatacggacgtcaattcccgcttcctagaaacccgtcagctctgcctgagacgaagaagagaaggaaaacttacccgaataccggtgttggtggcgtccttcacggcagcgagaagaggatcgtacactgggtcaaaagtcatagtgaaagcactgtccacaatgcggccgttaagctgcgcaccgaagtcgaccttcatcacgtctccctggttcaggaccatcttgttgcccgcattcggggtataatgcgcagcgcaatggttgatgctcaaaccacaagggaagcccataccacccttgatgttatcaccttcctccagacctgggtgacctgtcagggcgcgcaccgaatcctcgatgccctccgcgatctcagtcaaagtctgaccgggcttgatgttcttctgcgcatactggcggacttgacggtgaacctcggcaccctggcggtactcctgcaggaagtcattattcatgcgatcgaggtatcgtttttcttcgttggtagtacggtaggcattgtcgtttaggtattcgacgatctcgccctcggggtattggccgttggggaagaggttagacacaggaacacgcggtggctcgctctggaccttggcaccacccttcttcttgggcttcctcttgggcttcttcttcttcttctttttgtcggctagaggtgaccccgccgttagtcccggtcgacttctgtggggtggggtggggttctggaagcgcggtcacggaaataaacttcaacaaaactcacccccagcagcttcagtctctgcggcaccctcgccgtcttgggcgtcgtccgagtcctcctccgcttcggcgggaacctgatctgccgtgcgggcggcctggacgttcactggtctctgatcagtcacacatgagagaagtaaacagaaaattcgaggatcttacggtctaactgatccaacttctccgtagtctgagctgccatcttgaatgtggcaattgaacaagtcgtatgttcaaaggcaagaggggaatgtcgggtgtcggggaaagagttttgctgataagataagaagaggcttggagatttccttggcggcggatggatgttgctgcctgacatgcctgttgtgttgtacacttcaacacgtctaccatcatgattcatacatctccatctcccgttcatattgccactattaaactatgtcgctacttaaacttcccgctgaacttctactaaaggtatcttcacatctagaatatgtttccgatctcgactccctctatcaatgtcatcctttcctgtatactttgttaaaagacagagtcgacgaacttctgaagacggagcagtctatccagcatctcgcatgggctgcagtgaatgggaaggaaacatgtgttcgcaagctgctagatgtaggtgcgttattcgatgattcgttcgctagtgatgctgcgcctggggatgctgcgcctggggatgctgcgcctggggatgatgagtctagatatgatgccgtaggtatgatgcacctaggaatcataagtccgcctgtcgcaagcagagggatgatcctatgacgatagctgcaaagtatggtcattttgatgttgtccagatgttcctcgatcgtagaagagacccgactccagagatcaacgagtacatctacgtcgaccttgatcaccttgttgtcttcggaaacccattgtccgtcgcagtgctagggggtcatacctcagttgtcagtctcttgattgaacgtggatttatcaaacgctgtgcagaaccccggcgaaaagcggttgtgcgacctatcattatgcttggctgttatgaagaggcatgttcccatcatcaaacttctgcttgcaggaggttgtgatcctaatgttgagtgctctaacaaggccctttgcatcatattgccctagctcctgctacaagcgcaactgtagaaatcgtccgtcttctaattgatgctggggctgaattctggacaagcatgaatggcgacgatccagtcttttctgccatggaaaccggcaatgggctgtttctcaattacaccttcccactaattgagactgacaccgaaatatttctgatgatgcttcatatgttcaccggaaaatacaagacatttacctcgtccctcctgaagaggattgatttagactacacaatcacctttggcgcgagagaacgatgtagtcttctgtgtgtcgctgtaggtggcggcttcccggatctgttggagagaatactattattgaggccttattattcaaaggaatggtcttgtcccaaaggccatggaagtcttatggctctcgctattgcatctggccatatcggaacgatagagttatttctcgaatatcgcgccaagcttaggacggccgtgacttatcccacactcatagtggaagacaatgacggacgctggaacttcgatgattgccctccttcaatgattcttgcgcttaaccgaggccatgatgatgtcgtgaagtacctcatcaataagggctttgatgtcgtatttccgtcgtcacgtcatgggaatggttttttcaacagagcactttatctgggcaaagcggaaatcctccagatgcttcttgggagttctagtccatcaatcgaagatattgcgttgtttggtgatggcctgtcgattcagctcgcagtcttggggggagaagccttcttcaaattactccttgagcatggagtacaactgcgaccgggtcacgttggacattgccgcgcattcgcatgtgctgctttgttagctaacgtgcctaccttgacgatgtttttggatgctggtttcagtctggataagcaggcttcagacaatgacgatgacacagtcggcctgttattggaactcgatgaaaatagaggtgtcacgctcctcgctctcgcggctcagacgaaagatcgcaatgccgcggaagctgcggttgattttttgctagaacggggagtgcagctcaaccagttaactggctcttgcaatcacacgcctttactccgcctagccttgggggtagctggaaataacgttagcactgtcaactctttcgtcgagaaaataaccaagaccaaggtggacgaatacgaggttaagcgactacaatactttgaggaaactagcgactacggattactggcaagacagcttctattggagaagggggccgatcctctatttttgaacagaagtggaaagtctgccttgaccgtgaccgcatggagaaatgatatcagagaggtcaagatgttgctgggatatgtcgatccaaacgttccgatcagtacgatcaattctcatatattgacagcgatggccctgtttgatgattctcgcgacactattcaagacgagaaaagaccctctttggccatgcaaaagactccctggaatatttattggcgcaaggtttacccttgtcctagcgaatagttgaatcgagtacaggtatgcagcatgtagcttggcggagatttcgttgtaaatggcagagaagagttatctgatggtatcaaataaatacgctgaatggctcagggcctaggacattccaaattagctaatgagtcaaaccaaggaagtaaatctgtgttctgatactatatacaattttttcatctcacatgtgacatggataactatagttcttgactaacaggtctcctttgcacccgagccatacgaagcttcaataattgacggtattcggatgacccaaaacacatatccgggtcaaatgtggctcctttgtcaaaaagcagcctcgccattgtatcctttcctttttcgagggctaattgtaccggtcgagagttgccttcaccactagggtcagcaccatggtctagtaagagcttaacagccctagggcggccatagcagacagccaaactcaaaggacagaaatggactgcccttcggtttggttgatggtctttatcaaggacggacgactctttcaataccttctctaaaagatcgtcaaggcggttcacaatcgccccctttaagagatagcaacgttgaagattaccgtacttcaatatgcgatccacatcaatccagcttagcagcaatgaccccatctcgtggttgtcccttggtcgagagaattcccacaagacttccaaccatcccaattgccgccaatgaaggttgttcgctaggaggagcttcatgacggggaggttgtctgatcccgcggcttcgagtaacagtttgtcatatatatacaaatctgcaccagcccctactaagagttgggcaatctccagatttgcgggtgaaggtcttgtagcagcagctaccgctagaggcgtcataccacgcaggtcataggtatcgaggctgcaataattatattcgaggaagagtctgacaattgatacatgtcccagttcgacggccttgcataaaggaattgcagcatgtctatcgtggctgttggttttgcaatcggccttgtgttcgaggagcagtttgactactgcagcatgctcgcttgtgactgcagccttgagtgtcctgttgaatagatctccttctttctcggtgtcatgttgaatgcagtagggtaggaacaattcaacaatattggtgtgtcccttccacgctgcaatccttattggttcttgtccttcgaagatgggaaggtcgtccaatatcttcgagccgcacatctgcaacagtttccgcgcactagcttccttgcctttttcggctgcccaggctatcgacttcccaggtgagtctttggcgatggctttgtaaagattcctgtttgacagagcatggaagtggcggctgacccgtgtgaatgcattgaggtcacggtagtcaaggtggagggatatctccagcagcatctcattagggagctctgaaagagtcgtcatgtttcgatatagtttgattgtattgggagaagatgtgtgtttcaaagaaaaaaaggaccaaatctgtctgtctcttttgactataataccaggtggtttctcagactgaatctatgtgatgggacatcgggggatttatacaggttctccagggacctgctttgaatcgtgttttacgttgaataaagccagtgtttcaagtcaacgccttgttcttcgtgtgtggtagctctttgatccggaaatccaatatagtctcaaagggtataacaatatcgctatacattgtgaaaggggggttggcgcttcattgtctatttatggatactagcgagtacaagggtatatgcagacacaaagcccctagctattccatatccttgtcaaagaaaagcttcaacttcattttcagttgtcttcatttggaaacgatatcaagagtcggttgaaaggcgagattattttaagcgctcaattaaaattcttccgtaatcggattttcaagcccgggagagtgggtgattgcccataatcatgctcaaatagaagccttaatgcaggaactgtttcgtggctgagacgcttgacatgttctgggtctttcatccagtgccgtaagcgccgttggaattttagtgcgaatatgaaacataaggagaagcaatacgcgatgcgccgattatcattgaaggggcccaggcacgggcacgataggattggtccatatatttattacgacttcctaagcgcttgatgtatagttcccatattgtcgggaccatagcaccaataagccctagtctcatttatatcagtcccactttcatactgcttatacaccctattcctaaggcagcgactatcctaagaggagccctacttcatcagctgcaatgagataccaccgaagcgaagctcacagagagcatctgcaacccctataacgaaagaaactacaatctcacaatatgtgctccgtagatccttaggtatccatcccaaaccggccaaggagtgttctcattggatcaaaccgttttgatgcccgaaatggcataacctatctcttatctaatctgatcatcaggagctaactatggggattgcaactgcccacgtgagtgtaggttatattgactgtgttgttcccagagatgaaagagaccaaatagaatacatatgtagaattccccagtagccagtaataaatatgtggtaattttgtacagtcgatcaacttcaaaccgctgtgacgccactgagatcttcacctccagtcttcttccgcttctccctctctccctcttccacccctcccccaacctaccgcggctcttatttctctattgatttcgatgtaacacccccttaatacacgacaatgcctccatctcgagtaacatcaattcttctctttccgcgcgcgaccctctctccctccccttcaacataccggagcatctcaacccaacccctccgaccgcaattacacccacgccaacaacaacaacaattcataaaaccaaccatatcctcattctcaaccagcaatccaacccgggcgcgcgaacaaaacttctacgaaatcctcgacattcccacaaccgcatcatcagcggagatcaagaagtacaccacccacacccacaccagccctcctccacccctcaatctccaaccccatatatctctttaaatacttacctacccaaccgccagacaattctacgccctctcaatgcgccaccacccagaccgcaaccgcacagacccagacgcaagccaacgcttcgcccgcatatccgccgcctacaacgtcctcggcaacgactcaaagcgcgcagtctacgaccgcgaccacggcttccacagcgcgcaccacgcctccccaggccaaagccacagccaccaacaccctatgggcagccacagcagctacgccggctcacggcccgccagcgggctgagcaaacggcgctcggcgttccacggtccgccgcctagtttctacgagcagggtgggtatggtgctacggggaggcaggcgcagggtcgggcgtcttctggtggtgcttcggaattcggggctggcgctggcgctggtgctgggacgaaacaggctgatccggaggattgggaggggtttattcaccggaatccgttgcatcatttcaatgctcagagtcatttccggacacaggcggcggaggataggagaaggagcaataggaggcagggagctaggaggattgatgaggatgaggttgatcctagggttgatcagacggtttcgaggttctttctttgttccgggtgtctaattgttatgctcgttgtagtggacttttggcgctctgttcctagtgctgttgatgggaggaagacgaggaagcagaagggggctttgtcttcttgacggagttgttttttcactcatacttggatacatgtagtttcttggtatatatagtcaagtgcattgctggttgatgtactcctactttggcatatctacgggcacacctcgtagtgctttatcctatacaaatcaatcgaattgatcaaagaaacagttgatttgatatacaaaaaaagtgatcgagcagaaaatctacgacacacatcgttactatcttggacgaactccaccataatcatcgttctggtgaatcagcaagacaagtgaactaataactgaagtttacaataatcttcccaaaagatggtaggccatctgtcaggtttctcggaggcttaggctctagaagcttaagactcgaaggtgaagctggcgccgaccttgtgggcagcctggttcaggttctgggtatcgaaggaagcaccgaggccgagggtgacaccagggcggagcaggacgttgtaagccagagcggcaataccacggtcgttgatcttggcctaaattgcgagaaaattgcgcgattagtcgtgatctacatagttatataagcagtttaaccgcgtgaaacgaaccttagcgaaggaagaggggtccaggcggtacttgctggcgacctcgaggccgacggcgttgccggatgtggagtcccaagaagccttggcaccggcctcaacctgagcgttgacgcggtggtagtagctggcggagaaaagggacaggttgttgctggcagtgatggcagcggagtactgggcaacactgtagccgacggcagcggagtacttggtgatggcggccttgttgacgtcgtaaccaccctcagcaccgacgaggaagccctcgtggccgagaacggcgtcgaagttggcggaggggccgttcagcagatcgaagaaggcacgggcgttcaggttgggctgcttgaagtacaggttgagcttagcacccttggactgcttagcgggctggtactgggtaaggatctcagccttgaggcccttggcgatgttgttgtcgagctcgagcttggtgtcgagagcgttggcggtggtccaagcctgggtgagggtgaggcctggtcggagtgagcatattagcctaatcctgtgtatcttggcatcggaaaaaataaataagttcacccggcgcgctattggaataccgcatcccaacatcaatgacataagacgggccttgtgcgcgccgggatctggaggtttcttctggagggggcgtttaccagtgggcgcatcaacgtatttggcctcgagctataggcgcactagttagtaatttgcatgactggattcagaaatagctttgcaactaacctgaccagcaatggggccctcgtgagcagactttcccttaacggtgaaggtgacaccgttgggagccttggacttgacctcaaggttggctaaaagctttgattagctatttaatcttcaatgagtggcgcaatgccatgcagaaacgtaccggcagcgccgtggtagaagtccttgttcaagagctattgggattaggtattagccaaggttccgagttttgtccccaacagttgtgcgtacatcgttggtcgccttggcgatatcggagaaagcagctggggcagacatcttgacgagaaaaatctaattgaagatggaggaggaagagctggttctaggaagagatgagaagagaggaagggaaggaagagatgtgatgatgttgggggaacctaggggcttagcacgggttagtgggaggtcggtgattggcggttgcccggctgccgggaaagcccgccgggaatgtttgggcagggtatgtcacgtgtttatgggagacattcaaaagacattggaatcataacattataccgactatacaccaaaagggtacacatatacaatctaatccggtgctatatcccccaaagaaaatgctagatcagaagggaaagttcggatccttttgtttacatgctctcagacttttactccaccgacttctcatacttctggttgtggatggcgatggctctgcaaaggatggttagagaaaataatcaagaacaggggaaataatagctcaccttccactgggatcgctctgcttggaccaggtaggggtccatcgctcgacagtaccggcacagtagggagggaagtgctcatcgaacatggtacggtaccagtatctatagctaggttagttttcaatggtactataatatgaaaaaaagaagtgggaaacatacgcctccttggtgtcgggaacatcagtaccccattcggccttagggttcttcatcatctcgtcggtgacctggcgctcggcctcatccttcaggccatcaatccagctgtagccaacgccatcactgaactgctccttctggcgccagaggatgttgtcgggcaagtagggagggtttccaggctcatcggtggtgtcaaaggccttgcgcagcatgtgcttctcgatacgctcgggggtgatcatcttgtccttggggtcaacacccatggcggtctcaaggaattccttgtcgaggaaaggaacacgggcctcaagaccccatgcggaggtggacttgttggcacggaggcagtcagccaagtgcaagttcttgatacggcggacagtctccttgtggagctcctccttgttaggagcagcgtggaagtaaaggtagccaccgaagatctcgtcggaaccctcaccactcagaaccatcttgacacccatggccttgatcttacgggagagcaggtacatgggagtagaggcacgaatggtggtcacatcgtaggtctcgaggtggtagatcacgtcagagagggcatcgaggccgtcctgaacagtgaaggtgaaggggtggtgcttggtgccgaggaacttggcaacctcaagggcagccgcggtatcgggggcaccgggaagaccgatggagaatgagtgcaactgctggaaagtggtgacggtggacagctcgttttcttcgttgattccaaccaactcagcgtccgcgttggtgttctggggaatgttgcgggcagcttcggccaagcgaagggtctcgcgctgggcgatagatgcgaccaagctggagtccaagccaccagacaacaaaacaccgtagggcacctcggccatcagacgcttgcggacggccttctcgaggctgtggcggatcaccttatagtcaaccggggtcgtggggacgttggcagggtcccaccacttgggctcgaagtagcgggtcatggtgtcggtgctcgaatcatagatgtggccgggggggaaagcaatgatctcgtcgcagacggggtgcaagcacttgagctcggaggcaaagtagacggcgccgggagtcgatgaggaccggccaaggtagaagctggtgacaccaatgggatcacgggcagcaacaacacggtccttcttcttgtcccagagaacgaaagagaacatgccatcaaggtgcttggggcaatcgaggccgtactcctcatactactatatatcagcattccgaatcttaattccgattcacttatgattggcctgacataccaaggggaggataacttcacaatcggagtgtgtcttaaagttgtacttgtggcgaaggtgcttgcgaatgaggcggtggttgtagatctcaccgttgaccgcgagggcgagggtgctgtcatcgttgacaaggggctgggcaccggagtctaagaagattttgttaacacatcgatcttcaaattccatccttcatagggaccacataccaacaccgacgatactcagacgctcgtgcgccaggactgaaccacgatattagcataccacgccgaaaccgaagtcattgcgtgttaactcactagtgctctgagcgcagaagtttccacctgtagaaaaaccttcgttaaccccatgatcctcccatataccgcgcaatattgcgactcgggttgtgactcactccaatcgggaccacgatggcgcacactatgatcaggacacgagtcagcattttgttgccaattgcaaattgcagcaattgaaagagatactcacgccttggccatgcgcaaagctgtaggcttgaacttttgcacatcgggatgactataggagtatggttagtattccgcaaattgaacatcccactagaggccgggagttagggtaggacatgacgcactggtggcacgcgaaaattccacacatgatgggcaattgggaaccggggtagagatgaagatcaattcaggaggacagagagaagaagaagaagggtacgggctgaaattgactaatcgtgcgattatatggggaacctctgagcggcgatttttttcaaattgggtgcccgccctcccggcggggcgatgtcggcaagtcttttgagtcaccgataagatagcctgtgggcatcctgggccaattccaagtttacaccaattagcatgtcgggttaagagattttagctgcggtggcaagatctgtcactataggcgggttctttttgccgcgtcatatgactattggagtatagatccttggagaatcatcgattcaagatcacgtgactgatatataccccaccatgaactatctagccctagccaagcccctccttgtccgtttcaggaaactgaaatatatgctgatcatgagcttgtttcgttctacaagcatgtctatggattgcttctagaagcacactttggttggagtttattctcatttagcgaaagcttcttgtgttgttcccctaccatcagcatgtgatctttaacattctttgtactatagagacagctgggaaagccaattccaaggagaaagcgagagtcacaaagacaagatcacattcgtctcgatattgaggccatcaagatctaccgagacaatatctcttctggcttctcattttgggcctcaagagcaggtgtgatggtatcatcttgatcttctcactcaatgctaaaatggtgagtttcaagagacatacacagcccggtgcctatttaatgtgatgtctcgatgtctccatgacggtaccttggacttgcgctagctgtattggcaaatatgacgcagtgttcagtacacaatcctataatgttgaaattccaattgaagaaaggcttcatcaagtaaatacattggtgtcttgttaattgaaagtggaagttaaatgcagctttccaagacacccatcatggactcatgttgcatcagtgcagagaggtccggatattgtgctggctgctcaggtgattttacctcacaggagcagataggtacaacatcaagtcgcctctgcgagggtcatcctgaactcaatacatggcaagcgtaggtatcctggtagggccatgtatgtggtatcattgtttcggaatgaccctaagcccagaaaacgccatccattgggatatgtagaacgccatgctcgcgatagaaaagcaaaagttgctcccttcctttgaaaataaatgcataatcttcccacaatctccgcagtatcccatgctgaaaaaaaaaaaagtaaatgacccatggagcgccatcgctgtttacgcttgggtaactcagagcttgattgggctggtttcctaattgggctggttttccttgacagccatgcgaaccctgcgttcgtattgaggacggtccttcttgaagaggttgtaggcctcggcctgtgcaggtgactcagggttcgggtcgtccaggagatcttggataccgagcaagagctgtttaatagtgatggcaggtcgccagccctcctcctcattcagaattgacaggcaaaccgttccggaagggtagacattagggtggaaaagtgctggtgtgaatttgcctgaacagtcgtagtattagtatgagattatcatgagaaatcagaaaagatcatagtcgtagctcccattccggtatatcgcaaaaaggatacgtacatttgggaggcttggtagggtattctagaagcatggaaagaatgtagattagtatgaggatcttcagtagtgaatgtattgcgccactcaccatcagggaaaatcaagtcaatcttgaaaagtccaccttcccagagagtgttagccttccctggaatagcacattcccagttcttcagatccaggccaccctgcggggcacgtttaggctttgcgacaaagccaaatgggtgatcgcgacgccattgctttctagcgattccatgaatgttagtgcggggaagggcgtggcgcaaaagatgcgctgaatcgcgggatctgcgggataagatatatgcttaccgctcttcctggagacggttctggcacaacgacatctcggggagtgttcagcggatgagtagctgaaacgggttgactggcggaggatggaagaatcaagcagcagaaggatgcaacttggccgaaaatagggtgtaggtcccgatggctggctgactggtgggtaataagagagggagaaagaggtaaggggacgagtgggagattttaaaggtggcaatcgtcaaagcttgggaggtgatagcaattgacctccccacgcgaacaatgagtttgcttatgtaatgcatgcaggccttgtccaggaaccaaccagggagcctcacttctattgttaggtgtagatagcaattacaactggttctgcagtattttctttttgttgtcttctatgtggttataaaattaccacatttgtccagcggtcttaatctaatatcatttgttctacttctccgatagaagtactgctatgtatatgtaggactaaacacttgcactttcagcgtcagtttgctatgacctaatgttgaaaatgtgagctcaatcgatcagaatactgaaagttcaagagtctccaattacagctcctgttctgtgccatgagctgcacagagcccttaaagatggtacctaggtcttgactacaatgaggattcgtgatgctagacggtgctacatttatacctctccttaatattggtacaggttattgatcgtctcataaattttatcatttgatgtatgtaactgcgtacatagagaatgatatgtagaaagtatgcggcgaagttacacgatttgaggggggaaacaagcgtgcttcgcgtgccaacaaagaggagggcgagaaacagacaggagaatcattatctggtctaaagttttacaaattgcagtaacaaataaagtgaggctttgctagtccgtgggcaaatatcaattctttcttgctaagcagcttagtggttacgtacctagccctaagtagcagggaaattataggcggaaaatatgactatagaaatacgtagtagctatgcatagttcggggagtgtggatctcgaatatactaatcctatttatggcatatatctacgtttatactgtattaatatcggtccaaggtatagcaatttagttggtgatatccagcaagatgttcatatagagcagcaagctagttatggacttccgaccaaccctacctgatagaattaagttcctgctattccaacctccataaatatgtcgtatttcaagagtcattatccttcgcctacaaagttatggacaaaggcctccagggtaacaaagagccaaaaatgctctagacataatgccttccacccagaacaatagctattaaaaaccaacgactcagcgagcaaatgtttctttattcgaaccccggccggattgatcctcgacaaaggctctttccaacaacaagtttgccggcagatgccaacatactttggaatctgggttgaggcgtataaaggaggacctgctcatttcatctatcatactcctccgaaccacaatcaggagcccttagtgaaactcctatgagcaatatttacatgaaacatcccaaagttacttactattgtttaccataatgtgtcattccatcgtctggtactatgccctatgccagcaccaagacccggcagcaactcgcctgatcatgtgccgcagagccttcatagtaggctacgagtgtgccgaagcgcaaaacacattctttttctcgattatagggaattgtgcacaatgcaggcttaaccagctgctgctacgccactctgtctttcgcgactggcggagagaagatgttctgtctgcgctcaacggtgcattccaatacagcgacgaagacggctggaatatcgatgacagcgatgccgacgaattagatatggaaacttggattccccagtctcccagcttgactactaggactttcgctgagcgagctgagaaccgggagaccaacgtatcattccacgagggtcccgtacgcacgccgaccatagtgtaccagtcctcgcctcacttgtcttgtgtcgctttggttgaatatgctgatgactacgcagatgatgaagatgttgaagatgagcctttgcaggagcctcagccccagacgagccggcgctggcgctctttgattcctcgtcctactaggttggtgcgcaacgagcagaatgttacatatatggcgttcagcactgatgacgatatgttggacacagagcctttcctcggcactcctaaaccgaagaagtatcatcggacttggcgttcctggattccccttcctgttaagaagttgtcggagcaatagattgatggaatagagtagtaggatggaaatctttgatgtttcataggagattagatgattgaattttgagatgattcatagtctgcattttgttttacttttagagtaatcctaaagtaatcctagggaacatcgcaatgagacttcactagagcaacatcaaatgaaattgagcactatcattaacatagctaattaataatatgaaagggtataaacataagccattggccatgtaaaaccccggtcatactcctcggtccgagaggccttgctatgattttgttgccgtgcaatagtcgagaatgcacaaattaacatataatcgagatgtcatgtcgtataagagaggacgaacatgggcagttagactgtgtaaatcccttggttgaacttgtcgagatcaaaaaaccgtgccgtgatttcgttgccattgaagatccggccttcgagcgcgttcacggcctaacggatatgcaatagtcagcaatgcacaactcacatttgaatcaagacgtagatatcaaaagcttacccgtagaccagacaagggatgagtaaatttgatcaagaccgggactggggttccgacgtcgcgagggatgacgactcgctccacgtccccatactatgagtcccggaagttagtaaaagcacccaagccaatcgaaaaaggaaacgtaccttctctttgcattcatctccaatctcctgtaccaagccaccattatggcttccctctatctccgcatccaggtccataccgttcaacatgccccgtaggatgaccacctcactcatagggccaaacttgctggtttcatattcgcccttcttgttgcttccaatgatcttacctcgcccggcaggtgtgacaaagccaccaccctctgagtctggtcgcttctttcgcttctcaagcttgacttgcagcggcttcaccataccagaaccagtagcgccgaggccggaacccttggtccagccatacttggaaagcagtcgttctgcgaaaccttgttgcccgggacgaagagaccgtggagcggactcgtctggttcttcctcgtctgccggttgatcttgggccaatgcggcttcaagttcggcttcggaggctgggatttcttctgggggtggcggaagattgtatcggactggtgcgcgggatatggttgcagagcttggctggaaggcgtcaagggggcgtggtggtggaggtgggatggtttgtcccgatggagggtcatcggaaattggaataggatcttcagctcggcttggagatgaaggcggaatttgtgcgtgagtagcgattgaatcattgtcgaggcgttgccctaatgctgcacggcgagcaaaggcatcgtccccagatgtgtcattggggatagaagctggtggtggcacgtcattgaggtttggcggcggcgcaaagttgcttggaggcgcaaattgttctggtgatatcttattagcctaaatatcgtcactcatcgcaaaagaccctaacatacgcttttttggctggtcataatcatcgctatcggaatacctgctcggtgagcgcttcctagcaagcgcatacaaggtatccttccactcgcggacttcaaagatcttctcgtcactatggccgtattccgcgcaatttgtaggccgagaagagtcgtagatatcttcccagttttggacaacatgtgtttcaaagttcttcttgcgcttctttcttccaccacgctgtcgcttctcacgggcgtacccatactcgtcatcttcaatggccgtccaatcagccaaagtgctctttgtcggtatcgaagggttagctgagggctgtggttgaggtgccttgggtaaagtatgtttcgattttggcttctgggctgagagctgtggtcttttggggggttggaatcgaagggaggctataaaaaaacatcgcacgtcagcatataccgcgtcgatattcaataagtcgagggtaaataccaggattcagttgttgctttttgacgctcgcgtcatcaggttgaggttctgtctccgcctgcttaaagacaacaggggcacgggagatggtgccaggtgtatcgccagacggatttagtaggttggcatacagggacatgccccctctcggaggagtaggatcagaagccatcactgttatgctatggtgagaaagtggttgtcttgaacgtcggcatcgcgataaggcttcttttatctggcgccgcaactctccgactctccgcctccccaccacctataattgtcacctttaccatcacctgtgccatccttagctattcctcgtctagttggtttctacttggatttccgcaactttgctcaattttccattgttaaaataaaatctgcgcctctatttaaacaagttcggccggcaaaggtcgatagctcaagcccaagcctaagccaaaaccaaacccggacgtggacacgatgaccgaaccaaacaaagcattagggaagccaaaaggggtatgtacgaatgcattgcacagaccaatataaacactatcaggccacttgatttcttagccaaatcctccaatccttcctccgctcttatatcaaatgagtcctttaatactgatatcgatctagtctctcaatgctcctattgcagctttcactatggctatcctccttttgacatactgtagtagctctatccgctctgcacggcgagatgcccaaacccatgttcccggtcctcatcagccacctccacgaaaagacgagtcctgggttgaacaagcacttgaggagagtcgagcgcagaatggtgggaagggacgatcctgaggtttacctacatacatatgtatgttgaagggtgcttttctacatgtattatatggattgaatccactgaacaggtgtttgataaatagattgtgataccaacatgtaaaattctttgttcattcgctcttgttgctatataggtgaaaagagagcagaaccaactggaagtaacatctgcatcttcatattcaatcagaattttcagtgtatgaatgatcatgccccgggagtctaagtgtattgacaacccagttcaatcttgaaattgttcatcatgcgaatagtgaaggaatgtgtgatatgaccaaaggatttgcaaaattgggtgatatgagaatatacaggcacatatagctgcttttcaattgatcaaatagtcgcaaggtcagtggagttattgatttatgtaaatcaggttagtaagtgaagctgattgaaatcgacacctggttgatctaaaattgttttctgaccactgttaattgattccaaagtgccagcattgaacacttgagtatcaagtacagattgatggtttgtcgaagtgaaaaatgtggagggagaagtggaaggaaaagagggaaaaaaaataattgcggcaaatttaaataatgtgtcacgtgcctgtcccataatctacttagcctaggatgcatctatacaacgtttatcatcaacaagctgtgtggcaggttttccacacactgtactttccaatgtaacaattgttaggcttcgcttgggatgagagttgatagtaatctgccattcttgaaaattcgcgctactttgaactcatcaaacttgtcacaaactccgaatacaacgcaagtactccgtacaaacaaggcggaatccaaagagatgggtctggaggacagttaacattcatgccagaggctttgcaatggtcgagatgaagtctgagctaattttctaacagatagcttcaattgaaatatgctattcgtctttcagaatcaggcttgggggccgtttctttatttgaggacatatattcacaagaatgggcaaccatgtagaataggtatgtatgtacagaaaatacatgcagaagccaggaagataatagacaagtcaaaaaggagcaagaaaagaaaagccatgcttggaggtacaataatgttccagctaaaatgcagcgagcatatgaagacatgtgaaagctgtttcacatgtcagagccctagaagtctggagacactgtcatctatgccgaaacgctcggatgctttcagaatgcagtagcaaattttactcgctaaagattgatctcaaatatcgagtaacagaccgcctcgtccatgtctatacaggttgtgacaaagggaaaaagaaggactcggcgatcagaagcggtggggtgcgatgtgataaaagcggatatgaaggaagaggatgaagcgtcgaggttgaaggttgaaggttggggtggagcgtgagggtggagcgtggagggtagaggttaaaggttggaggttggaggttagggttggggttggggttgaaggttggagatagtcttttgtgtgatgatattgtgtcaaatagatcgcgcagcttcttcttccgcctggagcctcagagcaccggcatgctgcaaatcaccgatctgccgccgcaggtattcgtaggtgagcatggtggtcatagcagccggaacggcccggaataggttgacgccgatccctgagtaaaacgcatgccatccctcctccttgaggattgtttggaacgtgcgtataacgccattgtaccgtgggcggctgggcattccatctgacgaggatatgccacccgaccggccgcggtcatgtggatgtttcaatccgccgcggaatgcgatctcttcgtgggattgcgccggaacaccccgttgctgtgtttggagtcgtgtccgcaaaacctcgtgcgggtacgtgattgtgctggcacagatcttgctgaggaaagtggcagcggatattccagcccagtgtgagctcccatcctcctggtgttcaccgataccagagcccgtgaacgtcatttttagatattcgtaaagtgggaattgaatggccacatgtgtcagtcccagcagagccggggtgaggccagaatagaaggagcgaaggccctcaatttgatacatctttcgagcagcatcccatgtgcctttgtattgccaaggggctcgcactccttcgctgttttgtttaatgctttgtgacatgagcctagttttgatgacccaaatagggttcgtcacaaccgttgaacatgcaccggccgtgaccgaagcatagccgcgggataaccaccagtttcctgtggttttgtcagtactgctgaatgaccgaatccttcattctggagtacttacctgtcttgtcatagaagtattcacgagcacggtcatagactgctagataaacagcccacgtggggagatatcccagcaacattggacctagtccctggtagagaccgcgaatgccatcttctcgccaaatcttccttccgcttccaagcaagccacgatatagcatccccgaggcaacttgctttgctccccgccgaaacccgccctgggcttgaagcttcgttttgataacatcaagagggcatgtgacaatcccagaagccatgccagcactggctccgcagagaggtgctacgtaaaagttgggtatcttggtggaaaagagctcgaggcgaattttgaaatcggagatcggcgcgggcaagttgggggcattgtcgacatgggttgaccgagcttgggattgggagctgtctggagcgcctcggccgtttgtattcatcttggcggctggcgctcacgcagcttttcgaccgtactgaatcaatgaggcttcccggacacgagcatagttatcgagtggctcaatccggaacccgagaatactatttcgaacggagctgggaaagagatgtagatttatccggaggtccaaggtccaaagtccaaagtccttcgcgggtgtaaggaaggaggtatgagtaatgacggagaattgagagagggttttggggggccgatgttgccgaacccggtgtgcttccttttgaatgcgcaatgttctattatcagcacggatgtgggcggggttctcggaatgatcaagcttcttaacgtaagcagggatcagtggattctttgctgattgacaaatcccatctctctcaaatcaaatgacaagatcgcaaaggggatatgacatagcaaaccgatctgttagatagagtgtgccgattgaacaatcccagattctcgccgcctaaggcgcatatagatcacgtgctaatagcctcaggtgtagaactgccgtttcaggactagccgcccgagctccgttttgcacaacctcgcaacatcgggtcatctcgtgttcccgatagcctttctaacctttcaccacacccacgtcaattgggatacccgggattcaaaatgtctgccccttcgctcgccagttacatcgtcaagcgcccatggctcaagagctggctcacccctctctcccactggtacaccgatgccgccggctacaggagactcggactcaagtaattcttgccctctcacatcgacaaccccccaccacgagcgattgagacagggattgggaattgtcaggtcaaattcgtcatacgtcggtggcatatcttttgaatgcaatcggagtcgtgtcgaattcgcccggagccccggtcttgcggatatcgttcgcggcagggttggaccgaaacacttgctaaccgcccaactaggttcgatgacctgatccccgaggagagcgagaacgtccagaaggccatcaagcgtcttcccgccaaggaggcctatgaccgtgtcttccgcatccgccgcgccttccaggttcgcccgatcccttctgtacccgactggcgcaaaggctaacaaatgtgtcaattgcagtgctccatctcccacactcttcttcccgccaacgagcagatcaagcccgaggaggtgagtccccgacatccaaatttcgccctccccgcattagtctccatatcggccaatcctgttgcacggatttgtcacatccaatccgactccgtttcggggtatacactctcaccacaacgaatacaatgctaacgatgcaaatcaaataggacgtcgagtaccttagccctatcatccgcgagatcgagaaggaggttaaggagcgtgctgaccttgacaaccttgttgtccgcaagtaagccgttgctacttggttcaatagaatatgaaaacaaggggttggggtagcattgttcttggcatggaataaacgcctggtgtgctttcttcgtaatggaatgggcgttgtcgtcggcggcccatggcttggttacgcagcctgagtgtactgatactgtacaaatcgattttcttcgcgcgcttatattcatggtccatcttgtatcgacaagcgggtcttgcacctcttggacatcactctgtagtaatgactggataagctatgcgggttgtggtagctggtctgtttgggttcgcccaataactatgcctacacagtaaaccatctttcaccttttcttatggctgtgaactcaaagccacaattcatttcaaatattaaatatatacactataaaaacttaaactacaacctcatctcgggtggtcgacgtctaaatcacacggtatcaagacaagccggattcacggatgtagtatctcttctacctcttttaaccgccaagaacagcaacatcaacgttctcaatccgccacatataccacatgaacagactcctagagcaactaggttagcacattgtctgctagttaacagtataaacaggatcaagcgtacctatatggtgcaaacttggcagcaagttcaagcatatccttttcagccatatatttgaacttaccaccacctttgcccttaagtttgctcacatcacgacccataaaggcagcgcagcctcgcctatcatagtgtcaataaacgcttccactaacccacagcacaaacatcacccagctataagaccaatagaatgaaatcaagaaatgaacttactgtactcccaaatccccagtagaaaacacatcaatgcgcttaagcgcaaacatagcaaacatctcaaccgaccacttccccaacccccgaacagcaataagcttttcaaaaagctcctcatcagtagcccgcgccaacatcctcgccccaagctccccactagcaaacttctccgcaagaccctggatatactccgccttgcgctgcgacagccccgccgtgcgcagggtagcgatatcacacttggcaacctgatccggagtcgggaatttggcatgtctatgcccatcaggcgcaacagtatcgggcaaatcaaacagtgacaggaacttgttccggatagactttgctgccgcgccagagacttgctggccgatgatgctgctggtcaggctgttaaaggggtcgatttcctctgccaggccggccggcgagaagagcggacatggatgctgctcgatcactactgcgatgcgcgggtctgttgctatgaggtgcgcggtggctttctcgagcagtgtccctgttgtggctgttggccgtggaagtccggtttttgagggggaggcatcttccgcgtgcgctgggtaggcgtttactgttgagccgtggggggttatgaggattgcgtttgttcggtgcgggtcgacgggacggtcgaggggagggggggtctggggtctgaatatcgtggggttagtgggtgagagttggttgtctgtttcttgtttctctgcgactgcaggctccggggaccaataggaggtccctgtttttggttttggttttgtatttgtaggtttcttgtctgatttgttggtctttgtgggtgccttgcgaggctttgtcactgcgctgtgttggactcttgcttcgctcggagctgagctttggagtagcggtgacttgatggttgggacggaagcaagtcgggctgagcgtctgagtgacattcttgaataatatcagatattcaatgacctatatatggggtactggacctgaggaggtctgaggagtcgtcgtagcggaagctggggtttgctgacgtgcggagttggagatccgccgcgctaccccacgaatgtcaaccacactgacactcttcaatgggagctggacagacagacatcgaagcttaataatattcatcattgaccgttgattttcgatatggtaatcgctcttattttcgtgcatgcttaccacttctcatgtatgacgtatttccaacatatgcaagctatagtcatctatatatctgagacctttagacaccgttatgggatcccatttgactgaaagcctacgtgcaggagtcgtggatatttctagtagtttcaacaagcacctgtggagctcaggaatttgtttcttacgccaaatctatgaagaggagtagggttgcctgccaagagttatatccatgggttatattgaaacttacacgagtaactaactaggatcttatgaatcgcacattactcctcttgtcatctctctctaatcaatatcatcgtcatggattatctgcaacatacatcaactcccttcgttgtatagatgtggtatgcgatccactgatggttctatgggttgttttattgcaaacagtgctatgattccaatgttacatcgacgaaagttcgataaaagcctcaatgcacatagatgtagcatccaaggctatttgccccaatgatatctatggtatgtgccgatgatgaaagatgtacggaatagacagttgctataaatatccctataatcttgggagacgtatacggccagtgattgtaccttggatttatactgagaactcacgcgattggatgcgatatactccgctacagcattgtcccaaggaactatccgcaagaacaccccgtggcccgaaattgaagaaccatggtagcttggtaatatattacgagatttacatgaaatttgaaagacttaaagatcgaggatgggtataattcgtgatatattagcgagattttggattgaactattgttcaaaagatcggggctcgcgtcggtggcttgcgattatatattaacccaatcgccgacgaattttatcggaggggttaaaatagaaaaataaatgaaagaacagaaatagtccaaacgaaccgaccgttcatctattgcaattaatagatatcgaccaataaaaaccgagattatcatttaggccgaagcgttgagccgagtcaactccaagacgttggtgcattagttcgaaatcagaaacaagaatgaatccctgctcgtgcgactaccactagaagccatcagactatgataactagaaggtctcgccttacagccccagccttcaccaggataatgcacataacccagagtggtcgggcgagtacattgtgcgtgtactccgtacttttggatcattgtccgtgttctagggaatgtggccattcgcaacccctagataggtcattgctgagcgttccacgcattcccatgcgtggccctctcaaccttttagggcagacgggaatgtgtgttgaatgctaggcagaaatcaccatacacttgtttctttgtctttcgtactccgtacctactgtgacaagtgccaagtttagggccagtacagctggactcagctttggggtatccatatttgtggcgtaacgagcacgggcaagtattgaagtcagtatgtgtcgaatttttccgaatcaatagacttgggtttcgcgacaaggccacgcggccattcttcatagtcgaagacgtacggaggaggatatagcaaatcattgaagtctttcgataggattggacgcgatagaaaaaaacatatcacgtagtggagcagtacaagagtggggtgcgacgtatcgagtgagttggcttcttctgaaacatttcccgactttacatcgccaataaccactttgccacccgaaaggggaacgacatttaagtcagttgtatccggagtacgaagtaaatattccattgtcaatactgtcaattccattgggtcttctagaacgaggtgcgatggattcgctatcgaagatgtaccgggccgatgaagctctagacaatgcttgacaggagctccatcgccggggccaaagttatagccggttctgcattgttaccgaaaacgcacagatgttgaaattttcaatgtacaacgtacgaaaatttccaaatgagtccttgagatcgtctggaggtgcgtccttgtgatttaaagctgtacatgtacatgtacaccgtacaccgtacaacaaggcaaggcaggtacctatactccgtacttggcgaggttatgtacctaattgggtacgaatggaaagtgtggcgaagcttcaaatcagtcgtgatcgactaccgatctccgagaattagattacctcttataccaactgatgtgcgcatggcgcataaattaggggtctgagagggactgcatggcttgatgcttggcataggcttttccgagcaccatttgcatatcacattcacgaggggggcgatgtttcgcctcaggtagagttggattttcggaaaacagccaggattgacagtaatccagggcgagtcattccaacgtgccaatcaaaagtcgcgcatgccgcaatcgacgatagcggcagggggcgggtccatagaaggcccgcaaatttagatcggccactatcaaagtgagaagcttcgaaaccagtttgaagattgcgtggctagtgtttcggggagaatcggtgtgtgtgtgcactgtgcagtggtggaggggttggcagttggtatgttgtaggtacggagagtctatagacctatgcattgtataagaatagttataggggctgagattgtctcatatagatgcaataagattgaacgagaaatgaagttacagtctaagacaatttaagatcaacaggggagtgagctgtgtcggattactagatgacgacaggttgataaattggctagttaacttcttggtcaagttcgttaagacgttcgtcacgagctagtatcatgcattattattagatccttctagtattaaggacgccggggcgacggtataaatttacatggtccatgtccaagataccgaggatatgacaacgtacttttgatatccgcaaacaaagctacaagacaccaaattctacggtagtacggagtatggagtacagagtacagaatcgccagtggcaactatcagatcacccaagttataggctaccttgccgagtgcatagcccgaattgaaagtgacgaaaacatctccaatatcatgcaaacatgaatatctacatgtgaactccaatattccccagtctatgaatcatcatgtaaacaaaatactcttccaaaggtttaccaaaatggagaaaggggggcgacttagcgttgaaaagcagggaattggtctggagttatttaagaattgagtttttgatttgattggtaatttgcagtcctgggtaattttcagctctggtaatttgtggtaatcctggtaatttgcgtaaccgtccaccactcaagtcacgagaaacccgataaattacctggcactgccctgacatgccggatgcggtactgtgtgtgtttcttcccccttggtatagtggcacctggtaagattagaatacaaacaatctccaccctcccctttcctctcgccccaaggctccttcttcttcctcattttactctcctccaaccttcgtccattcgttcttaccattatttgaagttcctgcctcgtaccactcggcagtatatctccgcttccctctcgtttgaagcgcttcttctctaatcactcattgcgaattttcctgctcaacccattcccatatctctaatcggtaccgacaccaataaccccctgatcgaaaaaatcacactgacacctcctttagaatcttgtgatgtctctcaagtacatcctccccgcgctggccgccagtcgggcagttttcgctgccagtgagtattctgttcccggcataatgatacacccactaatcatgtcctcttacagcttcctgcggtgataccaaggtcagcacccagagcgacgctgatgcggtcaacacttgcaccaccatcaagggtgatatcaccatcgacaagtcctacagcggcgaccttacgctcagcggtatcgagaagattactggtggtctgatctgctccggtggccagaacgtcagctctatcagcgccagctctctcacatcgatcggcaaagccttcgacttggagggactcaccaccctgaccctgcttgacttcgctgagctcgactctgttggctccatcaactgggaggctctccctaagctccagtccctgtctttcgccaagggtgtcacccaggccggcgatgtcagcatcgccaacactggtctcactgatctgaccggtattaccctcaagactgtcggtaccttcagcatccagaacaaccgtgatctgaagaccatcaacatcaacaacctcatgaacgccaccgacttgatcagcttctcgggtaactacgataccctcgaggtcgatcttcccaacctcggcaccggtaccaacatgaccttccagaacatctcctcggtctccctgccttcccttgagaagcttaccggtcagctcggcttctggggtaccaagttcgagactttctccgctcccaaccttacccagaccggtgacttgatcttcaaggacaacaccaagctgtccaacatcagcatgcccgttctgaagactgttgacggtggattcaccattgcccgtgatgacaagctctccaccatcagcctgcccatgctccagcgtgttaacggtgccattgacttcagcggtacattcaacaagtgagtatccttcccatagctctatctgtgcacatactaacaaccaataggctttctcttggtgctctcaaggacgtcgagggtagcttcaacatgcagagcacccgcggtaacttcagctgcgacgatctccgcaagctgaagagcgacgatgtcatcaagggtaccttcaagtgtgatgccaccaacgccaacgccaccacttccaccggcacttctggctcctctacctcttccagctccaccacctctgctgctaccagctccggtgctgccttcatgaccggcgccaacgttcccgttgttggtattgctgccgtcttcggtgctcttgcccagcttctgtaaggtgttgattagtggaggattcaaatgaccttggggatttttgtacaaaagtctaccaagcagcgagctcaatattcgttccacattgcagttgttacgataataattcggtctttcgtgcagaaaattcgcaatatggattctgacctcgggagacgcctctctggaaggagttcttttcttatccttgtgtttattgctttgctatgttccaatgttcgctcatcgcgtcctaatgcattcggttgcaatttgtaacctgctcgttccctgttgatataccgaaaggggaagctgctgcgggcctgttggtggcatctcggttcttgttgtacttcttgtgtaaacattccttgagtttttttaatgccgtaaccttgccttttattctagttgcgtgcgagataatgattgtgtacctttttccccggacctttattctcatgaaagcagccatcgtacatatgtatcatgctagttctgagtagccatgtctccttggtccattcggcctcggtataccccttagacattgtgtctttgcagtgcctgccgcccgtccaaatagtgtacacacacgaggaatctgtcatccgttttctatatccatcaaagcctgcggctttctcaacaagatatatatccaccatgaatcccattccataaccacgccatgtccaaccaatcgaccactctagttccaactacctcgctacagaccaacttcactagatcccaaagtcaaatctccaaagacctatgaaacatgaaactagtctccccaattccaaatcgcaccgacaagttgaacacagccagcatccacatccatccacatccacacaacaaaacccccggtgaatcaattccaacacaacctagcatgtgtctacctaactagttacatacccaatactactctatcgcacctactccaacaaccccatcctaatctgaggtcataaccgaccagcatcacaaagccagtggatcccggtgggtacgcactaagcgttggacgctagtcactcactgaatatcggtagaacacatccatgtgtgcgttgttcttttttttctttcttggctcgggctagttactaggtaccttagtagttgtgggataggtcaaaggccatggattatgggaaaaggaaagaaaagatgaaacttggttcggcgattcgggctacataggagtcgtccccggggctctctgctcctatgcaccatagtggctgttggggtgcgctttttttcgttggaaggtggaatctgtgggagattggttcggagaattagacaatagtatattatagttacagcgtggaaattggaataaaggaaagtatgagattctattctgttctatttgagctagtaaatatctactcccaagtacataggtaggcccatatggtatgattgtcagtagacattgtatgttgtatgccagggatataatgatagtacaacatagaagtaccttcacactcgttcctaaagctaccatgtgcgtctcagaatcatcctatggccggcatcaagttccgaagcagtcagaaatcgataagtcgaatccacagcgccgggccgcatccctcgatccgattcgaaggctatgtgcgggctcttcactggcgagttacatatgtaccaacgatcgggatcgcagctagcttgaaacggacaacaactttcatcgaatcggaggatgattggtggttggtgtggttggttctcttatccggagaggaatatagggttgaaggaaggctgggacgtttggcgtttcgatagacttggccaatcatgggaggattattttggatattgttatgtattctattagtccgtatatattgcattatgatgaggtacaagtacatattttgagatattactttacaatcgttacttcgcagtcaaggtaattgtgcagtgatagctcgacgcaggtggctgggagaggggaatcggcgatcgttacgctctgaagactattatgcattagccttgcggtcgccggaatcttattttgagagacgaactcccaatcgtgaaaatcaaggaacaggcaatctcaccatttagacttatacaaagtactggtataccgtatagagcagtggatgacgcagggaggggtgttggatgtgtgcatctcatgattgccgcatgtgtcgacttacatgctccagactgtgcctgaacggctaaaatccatatagagaggtgttattttatagaaattggaggaagacagatggaggctgggacaggtacggtgattgacccgtctatagttttttttagaaaatctttcttttctttttgttcctctgcgtttcggggtcacccacttgaaacatttagatgtattcagaggcattctgatctctcggtgtcaagatattcgatctacgaaggcaaaatatcctttgatggagagccgaacagcaccgaacaacggcctgattggccctctctacctctacaacgttgtatctacctctacaacgttgtatattgtaaatttcacgtacttcgtactttgagtggcttttttagtgccctcgatctacatcggcattaaagtgaatatggaactgccaagacaatctcttcatggggtctggcggcgctgagagtggatattgaccctctttttttcttcagaagacgaaactggatcgaacacgggtacacgcaatcagaatatgtaggtaatgttgtcttcttgcctacagaccagcccgggctcagcagctccgcacataaaaagtggagagaagtgcaaggcatggctggcataagaaattacggagcactcggtagttaagaggccatgacagcatacaacataatattaaggtggcaaggagttatcccacaacggaactccgcttctgtatccttgtcagtccaaactgaaatcccccaggaatatgatgcatgcaggccgaaacgagaaaataaaaaataaaaaacaagggtacctgaataaagatgcacatcttcaggtctagccgaccagcagcgtacatccgccttgcattggaggcaaccagcgatccaggtaatgggaaattgtggaggccctgagcgcaccatagtgcgaatcggagcggcaatgcatcatgtaggaaccagatccggacgatcgctcactagaacgagagggaaagcggacggtgtacagagctcctaaagagctccacttcgtatctgtgttgcctcgatcgcgaactccacggggggaggatgtgtgcctgctgtatgtgtatgcatgcacctcgggggcgtccctcgagtgtgatctctcagatgcggcgaatttgagttccagaaatagtccatacaacgtacgtatgtactatgtaccgcgggcgtctgctagatctgtatattaggaagttgtccttgcaggagccggtggcgactgcgccagtcggggaatagattccctacggggattagagagtttctgtatcctcgttcgtggggttggggaattgaaggactttgggctgttggtgttgttttaggattttttcgtacttctgaatggtagatgtctgttgcctattcgagtaatcggtagtgaaccttacattcaagattatcttgtacttcatacggagcatagagtgggcagttaggtcttgatatggccttttctactccgtactgacaattatgatcgtctgcccttgctgctcatgccgttttcaatattggatagcatcatgtacgaggataacaattattgtctgtcaatgctctaaggcggggagagtactctgtacagaggatagtgcccggcgattcatgcaaataacttcctctattgaattgcctaacaggacacagccccttccgtgggatgagtctaacacgagcctaaatcttcatgtttgccactaacaagaacgagtgggaaattctaggcgctccagtagggagacaacacgcatagtatgtagtgcattgtatgtacgaaatttgagaaggcgattctggaaacagggaatagcaatcataatcgaagatctcaaaaaagcctcccccggaaaacgagaggtcgatattgcactcagaaaccacgaatcacattccatggactaagaacccgtccgggtataatatcctacacttcctgattcatgctacaaatataataagtgcaaacagggaagaggatctgacatcgtgcatgaggcgcttttaagcgcttggcgaggtttagcccgatagtattggagcatcccaaatcatcggataatcaagtgactcaaattactccatacattaatctatagtgttcgaataagatttttctaattataccgtccccgcttcgtcaatgacagttgaaacttgacaggtcagaggcggcacgggaaggcgactattggtaatgatttggggagaacaggggagcagagatgctcattggcgatgcgagtaagctttgcgatgacagcgtggaggcgaagggacctgagaagatatgtacttacaaatttgtatatggtggcttgttccttacacatgagagccgcacgggacgcggatcctgtccgagcttggaccgaatgctgtgtaatatagaaacaatatagaagaggggctatgaaagtataatcatcgcatcatttacagccaccgtaagaccacggtagagatgttcatactagaaatgcacagggtagatgtctatgtcctcgatgacacgcacattcacgcagaaacggcccatgatgaaacaaaacccctcagaatcgaacccaagggccaggttcagagtctattcaatgatccgtgaaactcaaaattttcgatttcctagtattaagaagatccggaggggagcccctatatgcacgtcacttaaaatggtaagcagggagggaacaaaaaggacaagcgtgaagatctatggggcccagattgttcggactttccgagcaatcatgtccagagctcgatcgaactcgggttcgtgtgaggttgccctcgagttgctactgttcgtgcggtctgcatatggcgcagagacgtgcgaaagtcagtatgagccaccgatcgggtgcatatgctatacgatgggaacagggaacagggaagagggaactacaactgagtttcagtgaggtttacaaagtacgaaagaggggggcatttaggtgaggttggttatctcttccgggtagaatgcatatacataacagcctgtccttaatttgcatgggctttttgtcacggcaataaataaaaagaataatataataggattgtgaacacgaacggctagaacgtggggactagtgtcctcgatggagtcgccatgcagccagctgattgaaagacgggaagggagaatatgacagctctattccccaacccaccagcggtgttctagtgacaatcgggcaagagagatgagtgatagattaattgtatggagtatattatttgagattatcgagattaaggagatgcaaagagaaatagagaaataaatcgatatgaggactgaacatagggctatccctctccactcagggaacgtgtccatttttaaggtttttagggcttcgctaggaataaaaaccaataaagttaacattctagatattattcccatctgactcgtcaattctctaacgtctgtgtctcacccaattccaaatcatctcgatcgtcatgattcgctgtctgacaggagacgtaccctggtctttgggtctcgtcccaactcgctggtttccccgtcgtttcgggtgacctattctgttgacctgcttctatgactataccgagttaatgatatttggcgtcaatcataacgtcgaaactgtcaatgtgcttatagctacctaggtcgattattcccgatttcattgtatagaactagatccttattcttattgatgtttactttacctcctcgcatgtatcaagatgacactcccgcggtccttgcttgatcctattactgaggggccatttacatttactagaagcgcctcgaggggtattagctcgttgataatagccaaccccttgatactatagcacgatcatagaagtttctcctgactatcgatgcaggagaccggtgtgcattcgttacagcaagcgtttcaccatctacggagatcgcagcgaggatttgatgatgagtacgggcatgaccgcgcatgtagatactgtggagtatgcaggtaaaccttagttcgattcggcgtttttgctttttttgttcttttcggcttcgttctcaccaacaattcccatgtgaattctctggacgttttgatagagactccaacgtcagctattggcatagctattgatgcaagggccataatgcctctaaaaactaaaatattccccgtgtcgatcgcgacaccaacagtccggtgacaaattaggggtcctggatcatcatgaaccttcctctcgggcttgatcgcattcccctcattcgtcgatctgatagattactatgtgaggttcggtctgtgcatgatgtgacagatacgtctgtgataccgaatataattattttcttcgatggcgcttcttcccggcccaagcggacactagcagatggtccagagcacccacccgggatgcccttcgtgcttccccgtcgtcatgaagctgtggggcaaagaagtccatcctctgtctgtatgacatccgaaattccgcgcttcatgtctgtcgaggatcggctggttcatcgatcccctagcctggatctgggaataaggaacaaagtactctcccaatctacatataaacatgcaccccagcccgcatggtatccctttttatgaatatcctcattgtatacactcgcctcgtgtagattccgatttgcttcttcctctattctgtctatagcctgccccctttgtccattactgtgcatatacaaccttgattcatctgcactgtcgccattcaatctacgactcatcgaccctttctacacgaaccacccgtgatctctcagtatatatcctctcggcatagtttgaccacttcgacacactcgccactgcacatatcacgcatttttcgacgaccaactacgatgtacgaagagatgggttctactactgacgatatcacccgccgctgctctttgccgtgagttgcctcactatcctgatatcaatctacatctcctaacatccatccaagttctttccactctagcaccagtatggctgcctcggacgtgggtgagaagcgccgactgcctcctcttcctcagatcttgcctctgccaccccgcggccctttcagcccattcaacgtgaaggacgcccttatccccactaccccgggggtccaggacactttccaattcaagtcaccttgggcagctgccgagcacatcgttactcctccctcgccggccaactctgccgaaggctcctggcaggagtcatttgccactcaaaagtccaactccatcgattggcccactgatctgacgcagagcgagatcatggctctggtggccccacagaatctcaaccgcaaggcacctctccagcagctctgcggccgcaagcgcaagggcagtgcccaatccactgaagatgaccagcgcgagaagcaccgcattgccgagggcaaccgccgcagcaacctcagcgagctgcaccgccagttagacagccgcatccacgatttcttcctcgagcgtgcaggctggaatccttccaagagccttactcaatccaaggagcacatcgtgcaaggagcgatctacctagtcgacttcatgcttgccattattgtccaccttatccggcaggaacaggtcacaccgcagctctcagagaagctgcagccccaggttcgctgcatgcagctgcagcagctagtcagctccctacagcaacaaaaccagactgcccagcagcagctcaaggccaccaaggccgagaacgaggccctcgctgaccgcaaccgcgcccttgagttccagctcaagtcgtacgagcagatgttccgctcccccaagtccgagagcaccagccccggccccgttcttgacttccccgagcacaaacgccagaagaagaatggcctacccggcatgcgggtgctctgcgatgagatcgctgccggcatgccttccgagccttcctatgctgctccctactatgactccatgcctagctcgacctcgcagtcctttggcagttcctatctctctgccacgccgcctatgaccggtccttcttctcctgcctttcccccttcccagtcttcctctttctcatacccagtgccgtcccgtcgccactctctcattacctctccatgaagccgtggagattgatgatgcacgcccgatattgaacactgttcactgatgatatcatgactcttctacctttctgcctgtgccccgtcctccttctcatcagaggcccttgcagcagtgcttgttctccctactatcgggtccgtttggcttcctccttccgtcgtcttcccgcttcatgtgcatttagcgactgcattgtgtaacaatattttgatctcggggatgcaccataggttcccaatttgctttatttcttttcctttgttgattgatttcgttgcgggtttccttttctttttttgcacaaatgcggtggtctttcttctttctttttgtctcttgtcttttggcgttgtttatgatatggatatatgttcaggtggatatattttgccttttgtttatttctttgtttcctttgtcactttctttttttatgtctatagctatgactcaatcgatcatcttggatgaaaatatgctcttgtagaacgatgatagtcctggtagtaaattgtatcatctcccttatcaccatgatttgtgatgatgcatatgccaattctctctcttgtactagtagctatattgatatgcttcccgagctagcacaaccttactctgagaaggaatcagaatacagtaatgcagcaagtgatagatttaggtttatatgtagatatagtacaacccctcgcttgatctcggaccgctgtgcagattgttgtttaggtgaatattaggagcgatatattctcctttcagtggatagtataacatatagatatctactaaagatttcatgaatactgggcctagacatgagaatgcaaagaatattccaatcggtaccatataggatctattccaacgaatcagccgtctctcaggtgtcagccggtggagaccagtccagactgagaaacggacgagttttctccgagtgttttggattgtgactgaattgtattctttctcatgagaatagtagaatagtagttcagatttatacatactagcgtaggaatggtataaaatatagtcgggtccaggccatgtctcactttagcctcgtgttgaagatcccacttgtcatttccaatgcttttattttgtaatctctgtaatcaattaaaatgaatggaattttagggggaaaagagaaatagaagaagaactacaacctcatgttagaatcgacagagatggacaaattaagagtggaaaagtactgtgtcagtgtccacgcaatccatgcagcaaagtggctacatatctaaataggggcacagaatatggagtagatggacagctcatttaattgcacccgtacctgcgtggcaacataataagaagaaacggtgatataatagcccctaaagtgcacgaggttctagatgatccaggctaaataaagggttctcagccgtcacactggttaaggggacaaagtgaataatttgagatgcttagtcgattgtatacgacagtaaaatagccaaagatccctcataactgctcacaatcccatcaacattgcagaataacacgtagaaaaagaaatgtagttgttttactgatctccccccgttcttggcagacaatcgcatttcccccgattcccgattctgttttctccctacccattcgcctcaccattcctctcgacccttttcttttctccacattcgttcggggggttttacaacgagtgttcgagacgggatagcccctggaattctacacaacctcatatcatctctcatcatgttgttgccaaagggtggtgttaattggaaatcggccaaggccagattgcctccatggagggccatcctcgttctattaacacggactcgcttcttggtctccatagccttgaccggtctggtcatcctcatgtggcgcggtgtcagcaggtctgcatcagagatgcaaaggtgagagaaacacgcgatcaaccgagacacccatactgactcgtctggtgccaacagcttctactgctatggctcgagcaagtcacccatggaaatgtccatcaacgagatggtcgaatggagtgcgcacgcccaaacccctgtcctcttcaaccgccacgaaccctacgaagtcaactccaccactatcaccgatctcgacctgaaccccatcaagtctacttccaaggccgctctcaaccgcgaacgtgtactcatcctgactccccttcgtgacgccgctccttacctggccaaatatttcgacctcctttacaaactgtcctacccacacgatttgatcgatctggccttcctcgttggtgactgcaaagatgacaccctcgcaaacctcgcctctgaactcgatcgcatccaaaaccacgccgaggagaaagttcgcttccgtagtgcaactgttattcagaaggatttcggtgccgacgttgagatgaccgtggcagagcgacattcgttcgccgcacagggtccacgacgcaaggctatcgcccgcgcccggaattacctgctctattcggctctgaaggccgatcactcctgggtgtactggcgcgacgtggacattaccgattgccccgagcgtatcctggaggatttcatggcccacgacaaggatatcctcgtgccaagtacgtgcttcttagaatttagatccgacgttggacagctggctgacagtgacattttttttttagatatttggttccaccgttacaaccaggatggccatgatatcgagggtcgctgtatgtatacccacgacaccctgtgtgatgcagattgctgacatctccactcttagttgactacaactcatggatcgaatccgacaagggccgccgcctgcgcgcgtctctgcctaccgataccgttctggccgaaggctacaaagagtacgacactggccgcacctacctggtcggcatgggcgactggcgaaacaacaaggatgaggaggtggagcttgacggaattggtggcgtcaacatcctagtcaaggccgatgtgcaccgctccggcatcaacttccccccctacgccttcgagaaccaagccgagaccgaaggtttcgcccgcatggccaagcgcgctggctaccaggtggttggactgcccaactacgtggtctggcacatcgataccgacgagaagcccggcaaccttggagaccgtaaagcgttctagtttttgcattccgtccgccggaaatctcgattgggatcaagttgatctttgatcccaccccgtccccgaacatccaccagtctccatcgccgcccgtgtgttgtcctcccgatggttaccattaggggctttgaaccgcggcggcttcacttctttcccttctgacccttttcttttccttttttcctctttttgggtggatgtttcgcgacggaaagcctaatgacttccctaatacagagtcttcgtgtcgcgttttagggagtgtgtgtatttgttaccttggcgctagggggaaaatgttgtttggcgggttcgcaggtctataaagttcgccggttctccaggcctctttcctcgatataccgaatctgtgtctgggacacacatcccgagttatgggggtgtgtgtatatccattacactcgagtgattcaatctcgatcatctgttcttcaaacctacattagggacggagaatcggaccgtttattgtcatgtgtcgttttcttgtttcccagtctatttgattctgattctgctacgcaggtcacctccaaattgtcctttcgatttcatcctttttttccgttctgtcatatgctgagctggcgtccttaacattttttttgagatgagagcaggatatcagaccaactcagttgcaatcagatgctgtgtgatgagtctagattcttgcagatgaagcaaggcagatattcgcctgtctgtcgagtttcatgtatataatcaaatgcacgaattcattccctgcaaagatacaagccacatcttacgcatcacgccaagtacgtagttcgctagatctcactcgacggcaatatcatatgggcaaacaataagccaccgctgactaggtttgaatagtatgctctaatttagtaaatacagagttaactagtgaactaactagtcctaaaatgataacttgatacaatcttactcaaacaggttcctatctgcatacccctgcaagaaattgggctaacaacataacgagttaaggctaacaggtaacgtaatcatctctaagccccccgaaagctgtctaagttgcctaactctgacaagatcgagccaatctccaaagatgaaatgatataatcccgactaaaccactttgtttgaaggcgcttgcgatctgcctaatactgcctttgttactccagagggcatgggatctacaggatcgccactataatcaactccagtttcgcttcatcagacaacacgatgacccccgtatctaaaacgtgtcaacgttgcgcagactctaaggtgcgatgtgtccgggataccaatatcgccgcatgtattcggtaggaatccggataacctctccgtggaagaaaactggagctcatctaaagccaggtgccgccgtttggaaaaagaaggtgtacatcgccggactggccgtcgatttaacggctttcataaggaccggtgagctggctttccgtgataaacatggtttaatcgcatctaacccatcacccagtaagatcgccgctctcgagtccaagatcaatgaactcaaggccgaccgtgctggcccaaaaaacaacaacagcacgagcacacgcaatacatcattagctgacggcgatgctcctgaagagatcatcaacagacacttccttgacgtggataccgccgaaaggtacctaagcacgttcaagaccaaactgaccccacacttcccatttgtggttgtaccccctgatgtatctttcaagcagctccgccaggagaaaccgttcctatgcctagcgattcttgcatcggcttcgtacgagaacatgccgctgcagcgggcgctcggcgacgaagtcaagaaagtcgtcgcatctcgcatggtcatcggtggggagatttccttcgagttgcttcaagggctgctcgtgtttctcgcatggtaaccccgattcttatcaatactttgatatttgtgagtgcgtctgacagaatatggcaggttgcattattactcacggccacatcggtatactcaattcctccaactggctataagcatcatgatagatctgcggttggaccgtccgccgcagacacggacgtggaagacagagttgcgcttcgggcttcaatataatctgcaggatcggacgtttaatcggccttcttgggggagcaacgagcagagggctgttttgggctgctactatttgtcgtcatcgtgagttttctttctgtcggggcttattgggtattggctgatagttgtttcgcttaggattgcgatgcttgtgcagaagaaatctactattctacgtctcccgtaccaggaagagtgttgcaagactctccgcgaagccaacgaatatccccacgacaagtacgtcagctatgtgatacagctacagttcattgcggaaaaggtcgacaatttatctgcaaagcatggatttgacttggaaacgcctgggtcggggtcggagctgtatatctcgaatcttaagtcggacctggatgcattctaccgtcatctacccttcgatatcaacgacagctgtaagtcccagcaggacaccaaattcactttcaagatacttgagactaacttatacctgtaaatgaagttcttcttgccatacaataccacgcgacagggcttggcctataccaactagctctcaacatcaccaaccgagatccccaaccccagttcgactccgactcctggaaagatgacatgtcgttctcggcacttatctcagccagttcgattctcaatctctacattgaactcccatcgaacgaggaagtcggattcaacaatacacaatgggtacagatagcatttgccttgctagttacctatcgacataccgtggcagcctcgaagccagatcaaactgctgccttcctacagactctgtcaaaattgaaatcgagggttggggcgttgtctacctctgatgtagatatgaaaggcgctcgagatgctttcttcgactttaagaaccgtatagttcaaatcgagaactggcttcaggggcatgatagacaggaggataactcccccagcgaggagaactttgaagagtttcaacatacgttatgcgtggaatccgagccgacgcactttgacgggtttacggaggctgtcgagacggaggatcttgatgtcactctgtggaatttattttcatcttcggcatcgggcttgcaaatgccccatgattttctatttgcatcttcttctgagcagattgtgggtgattgggtatgattatgatttcatttacggagctaccgaataaatctcaatattgtcttacctcttcgtatccatttcctccagttagtagtcaaaggaattgccaacatggaagatatcaaacaaatactgagaaatacgtgaaagcagaactgaataaggggcagtgctgtgactcagagtttctaagttgcgctgatcgaatccttcttgtatcgccgagccgatctatacaacgcgccaagaccttcagcatcaccgacccgattctgaaatataaaaaataaatatagatggaagacggatttgaatccaaatcaattgctattcagtcaaaatgccttcaatctcttacgctccattcttcttgctcttctcttcggccctctctttcaccccatgtccactcctcggccctgcattccctccgttttccctcgacacaaacgacaaaactgttgcaggggccctgcaaaagcttacacagaagtttgacaccctagtcgcaactaataatggcactcatggggatacctcgccaaacaccacctttagcatcgccttgttctcgtctgacgccgggaatgccgaagacgagcccttcttctggcaatatcatcacacagctcctatattgaaccagtctttggtaggatctcacactgcggacaaagacagcatttaccgcattggtggtctcactgaagtcttcactgtgtggagtcttcttcttgccggagacggagaccagatatttgatgatcctgttaccaagcacctccctgagctgattgataatactacaagggaacaagatatgaatggacgtgtaagatgggaggatgttactgttggtcagcccgcgagtcatatgtctggaattgtgagggactgtgagtaggacaccgaacagggcaaggttgttggttatcagagctaattcatgaatagattgctcgacggatgtgactttgcaaacaagttctgctgaggctggactacctccactccaggctatcagcataccttgctgtggtggtgattccaagtgtgatagcagtggtatgagattcaagtccgtgcctgctctctgtatactaatctctttatagatttcattcgacacctggccaaccaaactcgcgtggctccggctggggaaactccaatctattccaacatggcattccagcttctaggctacatagtagaaaagcgcacaggaaagcccttcagcaaagtcctacatcacatatttgacgtcctaggcatggccgaaacctcgatctttgcgccaaacagcaccactgcaggcatcattcccgtgagcaaagaagccagtggttggtcagcacacctcgaagcagacatagcgcaagttcatactctccccaccacatcccagtcaccaatctaacagtgcacccactgcagatcaaaatccattttctccagtgtcaaagatctcgcaacagccggccaagcaatcctaaactcaaccctactcagcaaaccccaaacaaatcgctggttcaagccagtctcccacacctctaacccggccaactccatcggatccccatgggtcatatacagtgccggctcataccccaacacatccatggtggacatctacacagttctcagcaacgaaggcaacgacaagagtctttacagctcatatctcggcctggtccctgatttcggcgtcggctttgccattctctcggccgatagcgacaccccagcagatctcaacgcgcacgcagatgatatcggtgatgtcgtgctaacagcgttgatggaaacggctaccgagcaggcagcccgcaatttcggtggcgaatacaaggtatccaatatcaattcgtctattgttgttgagtacgatagcttgcctggtttatatatccaggagtttgtcagtaatggtaccgactttcgtgcaacgctggctgggctcgtgggtgtcgcgaagccggcggatctgagtattcgattgtatcctacacagctggttgaggattctggatctggctccaagcaggggtttagagctgtctttcaggatgtgactgagttggcggatgctggaactgcgacttgtgtgtcgtggctagatattggaaggctccggtatggaggccatggcttggatgagttcatcttttctctggatcagagtggtcaggctgtcagtgttgagattccagctttgcgaatctcgttgcaaaagagctagctaagggctgatcttcttgcttgaagtctctttttttatgtgacatcacttttggagagccgtgccaccagacatcgaatatataaacgaagctattcggtttgctgaacctcaacttcctctgacttccttcgactagtaaagttcaagacatcatccaagcaagatatcatcatgcacgtgacccacgataaccttgctgacatacgcattgatggcccggggcctgagctcataaagcggctcaaataggaaagcccccctagggaaaaatccgtatacatcgaggtactttgtaggcgcgtactttgtacagaaacccccgtccacaatccaacatttcactcccttcaccatgccactgcgtctcacccgcgtcattcaaagcaaagtccccgctttcccccacgcgcggcaaccattcctccgcgtcccgccatcacacttcttctcctcctgcccctcagcgtcgatcaaaccttcccttgtacctagaaaatcaattctagccttccaagcccgcaatatgtcttccgcccctgctaagcgagagttcctctgcatcctgcccgataagcccggtgcgcaggcgaagcgtcttgaggttcgcccgtgagtcctctctagcatctagcttccagcgtgcgacgtactccgggatgatgagtctggctaatgcggtctttagtaaccacctcgagggcgttaagccacacgttgcgtccggcacaattgttgccgctggtatgtgacccatttcttcccttatgtagttagattgtggtatgggagcttctcaagcatttgtactgatatggattgtctcttgttcaggcgcaatgctcaatgctcaccccgccgatggcgagacaccctccttcaagggaagcatggtgatggctgttgcggagaatgaggcccaggtccttgagctgcttaacaatgatatctataccactactggtgtgtgggatatggagaaggcgcagattattccggtatgttaggcaggaagagtagaggattgtctggtttttttacctgctcattgctaacttgttttctggtttagttcaagtctgctgttcgtcaggctttgtaagttgcatgtctagtttagctttgcattggatctgggacttgacatttgtcgtttatattgaataaaaacaactggtcattgagcttgtgttgtgtctagatgcctttgggctatgtggggtggtctgttatacttttaagagcgcatagcttgatagatatagttggcttaatcagtgagaaagccgaggatagacacggttagcccggtacttttctatctgggcacggagtctccgtatggagtatggatatcccgattggaataagccgagcacaggaactatactccgattttatctccgaatgccagcgtgtatcatttcgatggaaccctggaatgtacggaatagtaatagcccgataaacgtagattgtattcgaatggtcgaagaatctaagaacaccaaaatgatgattgatcgcccagcgttgactttacgcctatcactcctatccactatttgatatcatcgcccaacaattggcccaaggcgaggcggaaaacaagacgttgaccgggcgagtccaccgcggagaacttcagtggtgcacaaaggtcgccaccccttggaactgatatcaccagcacgtactctcactggcacagagaaagaataccccaacttttctcatcccgcacatcattttaaatccagcgaagactgaggaagggaggaacggacgtcatctttgtcatctccgacgaccggcggatccggccaaaggaactaccccattaggcctagcgtgcttatctaagagccgatcagattatttatgaattcatcacttcctccctatcagatccatcttttttttgcctcccaacacatatcaccggtgcaaatcaatacccatattccatcaaatatacccatcataattcaattcaaaatgttcaagcgtttagtcactgttgctcctcgcgtcggctccgtcgcgacacgcagctctctttctcccctcactggcttgcagtccgctcaacccgccatccgccgtgctgctcctgccccagcccaacagcgcagaggatatcacgagaaggttctcgaccactacaacaacccccgcaatgttggctccatgcagaagggcgaccaggacgtgggtactggcctcgtcggtgcacccgcctgtggcgatgtcatgaagctgcagatccgcgtcaataaggactctggccgtatcgatgatgtcgtcttcaagacattcggttgtggtagtgctatcgcttcatccagttatctgacagagctcgttcgcggtatgaccctcgacgaggctggcaaggtcaagaataccgatgtggcgaaggagttgtgcctgcctcctgtcaagcgtatgtctctctttgatgcatttggttgattcacatgctaacttctctatcttagtgcactgctccatgctcgcagaggacgctatcaagtctgccattgccaactactacaccaagaaccccaacacccgtaccacagatctgtccgggacgggcggtgtcattcctgacgttaaggttgagactgtcaacagcccttctgcttccctttaaattcatttttgatttgatttgacggtgtgacgctctcggatggattctccatctgaatgacgcaaccccactcgttccgtttcacgaactctgcgatttttaattccgaggttgtcttaatacacaatcatttgatcaaggatgctgttgttttgtcggagagaatcgacaagaacgggtgtacttggagttcgttgtacttggtgtcgctgaaaatgtgtaccaagagatgacgatggatgagatgaaaacgaacaaattgaccatttgtttgatgtacatattttctttttttagtttcacgttctcatacgttgtgtcttgttctttttttttttttttctgcgatggcgcctcggggatccttgatcgatactctcatctctttcgaaaacagcgcgccttgatagtttccaatgaaacagtgaacccagaacagtcaccctctgtaaaagtagagtaatatcagaagcagtctatgattcatgatttatccacaatctatctatttgtacaagaccacactgggtctgcgagaacaccgcataacgaagccccaaacatagcacaatccacccttcaacaatatagccaagagctgaagaggccacatgcgaaaagaaatatagaacgccatcgctgatgcacagacagaccactcaagacaatccaatccgtgccaatgaaccaagggacaaaacaagggatataatggaataaagaagaaagacaccgagcgcaagccatccctcccaaaaaagaacattgtctaaacgctccggaggccgaagcgagacttcaaggacaacacagtctcataaaccgacaatttgacctcaacacgaaggtagctcgcgtaggcccacaggaagcggaagaagttgcggaagacaccgccagactcgttgatgagatctaactgctcttcgaaaacggttcgtgtggcatatcgcgcgaggatgaggaaagagcgcattgggccctggcgtgtgtgtaggttttcgtctaggctgcgagctggggaggggttagtcgatgataatccaaaagaagagagggtcgaaagcgaagtacatactaaggtcattggtcttcaagatgagaagaataatccgtggaacctggcctagcaagacaaccagctgttgtagcatgccctcacccaatgcaccagaaatatcatccttctctttagccgtccgcggggagacgacgctttccttcgtgataacgctgtagtctcgaccagtaatggcgctggcaaagagcggaaattgcttgtccgtgacgccggcgaccttgtatgcgaattcgcgcatccgtggcacgtccccatcgataacggctagccatagcttggcgtagttgcggcgcaggtcgcggtcgatgttgcggtagagcccgtggtcatagaggacgacgtcgaagttggggtgtgagcgggtgtggttcggacggatggcgatgttgccgccgtgaggatcacagtggagtggagcgttgtcgccgaagatcatttcgttgaagatgtgcgcgagggcggcggagacttcgtcacggtcgatgtggttggcatctagatacgccaggtcgtcggggcggtggcctgcaatgtactccatgacgaggatacgtctttgagaccacatcacttgaatctagttagcctcaggttacacatataaagacagagtcggcagcattacaaaccttcaggaatgaccagcggggcatcggtgtgctttttgaagtactcgctggcatgagtagcattctgggcttccatgcggaagtccagttcttgcggcagcgagaagtccatttccttagacaaccattccaggtcgtagtcagggaagaagcgcttcagcatggagaaagtgaatcgagtcaaagccaagtccagcggcacccattcgtccagcgcgggatgctgcactttaacagcgaccttctgtccagtttccttcaacgtagcaatgtgcacctgtgccagcgatgcagcaccgatgggcttctcttcaaaagaggcgaacaactcattcatactctgccctgtgtccttccggaacaactcgtcaattgactcaattgacgaaacggggcatcggtcctggagcgggatgaaggtcgaggtccattcgatgggaagcaggtagcccatgctgctgaggtgctggcccaatttgatgaaaatcgatccattcttttctaggacatggagtgtacgctcggcacatcgcttgtggcatgcgtgaatcagtgcgttatgttcttcgggggacaaggcggcttgtttgagggtaacacggtagctgcgaagatttgaggttgcgtcagcaattttgtcaaggcacagcatatagaaggcccacagggtccccacgcctcacttactcgttgatacagacagctagtgcgcctacaacgcgcccactgcgtttggccgcacccaacgcatgctgcgcttgatcggagaacgtcactgtgcccagaccgaggatacttccaatgataaaccactttatcatactccgctgcgatgcattcatattaggctcattttcggacttgtgctggctcttagcctccgcagacaagagaggcgaagccttgacagagaaagaacggctcgaagaggcgagggtcgagccgtgggaagacaccgagcgagtccatgacgaagtattgattctaccaaaggagggcgagtgtcgtagcagcgagttcgaggctagaagaaacgaggatccagatgtcgagggtttggatgtcaccgtagcgggatcaatcttgaatgtccgcaacgacacgcgaagcgctgcgctcatcccgaagcgaaggccaccggccagaaaaaaaccaaagaaaagaggaaatgactgatagtgcttgttggcgtttctgggctcaatccatcgtatgattctctgtcggctcagagagatttttcacggttctcgccgccaatcggcttcgatgctgcacgtgatccgatatagatcagcccataacagacgtcatagctaatttggcgtcgaatgcatttggacaaggcgtttgactggtagatctgatagtgaagcaagcatccaaacggattgtgaaggtgtatcgtaaaagaaacagagaaaatgggataaaaaccgtatatcaatggctggccttaagccgccaacaatacaatgatgcctatactatgtctatgagcctatgtcaagtacacttatgcaaattagaataattattgattcgaacaaaaaaaacatagactctatgtgcagcaaccagtgctcacataataacaagaagggttttacaaacagtaaaaccatgcaccatcactccaaagtccattttagagttgacaacgccgttgcctgagtatgaaccaggctaggatgacctagagaaattgaaacgtaataacacaaacatgtaaattcgcagtagaacctttggacgtcaaactacgtccactcaggctctgcgagtgttgggcggcggcgacgaggaatgattgaaggccgccgactcaggcttggagtcttgttgtcttcctcacgcagtaagtcaacgtgactcagtctattagagaggggccgtgttgacctgggcctgctagcgaccgcagagcttccattggcgacagatccaagaactggattgctgccatcccgactgccaggtctcatgaccagagaagaaacgatgagagagttgcgcgggtgtcggggagtatcccgaccttccaggtatccccttgactggccgcggttggctgagggtgtggatggggtagaggttgccgagaataagattggaggggtagtgcatgtgctttgtcgtcgggctgtcggtctgcgtttgctgacgccatacgcttcgctggatcgaaccagcttgcctgccatatcccttacgaggactgcggggtcgttttccatgttccgaatagcgtcgagaagaccataggttgcgagtagcccaccttgctcttcatttgaatcgcaaatactggctattatgcgcaaaaggttgagtcggacggcagctttggcgtgatgcagcttctgcctcagtctctggaagatatcaggccgcgcaaaagtggatgcgacaggaggactgagccgaagaagcttttgcagaggttcgagagtgttttcgaatgcgttagctttggaaagcttcaaacattccgcaatggcaccagtaaatgtaatggggccctcaaacgtatcactctcaaatatgccatccaagagatgctcttcaaccttggcggtttcttcttgaagcctaattattattcattgtcagctttgggaccagtcacgctttcagaacgggagacaaaccatgtaaaaatagcatccaaggcagtgacttgccaatatggatccaagagcaaagagatgtagaagcccaggcccttgttgcgccatagctccctacggccaacttttccagattgtgccatgtcgcagagaattggtagggcaaactcttttagcggccgctctgtaagtacgatcttttgcagaagcgggacaatgccgttcagtgcagcatcttcttgcctagacttgtttaggcggcacatattgtagatggtgttgaggatctggttcgagagctcgcggaaatgcgattttctcagatttgatcgaagcagatcggtcaagacatcgatggcgttggaattctggagcgaatctagagtagttgaaagcatcgacaggtttttgatgaatttcaacatcgtaatctgatggactgggctcattcgtctcaattctttcaagaccccttgaatcaattgttagcatagaacgttgcaagggttgttaggcggatgattcttactgtgcaagactgttcgttcagaaaccatctccttaacatgattctcggcctgcgagaatatgaagaagatattagcaatacgaccctcgataacttctgtcaactccccatcttcatcgagagcacgactgagaacaagagacaggggatcaaggacggagttgcgggataggattctacagaaatcgttcttgggagtggagccctaaagaaaatggttagatccgaggagatgcaaagtgcaatgaaggcgaagtacttacttgcagctcaaagacactccagattccgttcacaccaatcaagactagttcacgttcatcttcataatcatcctcgaggaactcgaccaggacattcaaacctccagcactgacgaacatctggagagtcaaggtagaagtctggtacatctgctgcacgaaagccgcagcctcgaggcgaatttcgcgggggtacttcttggatgcaaactcattgatgatagggattccaccgacgaagcaaaggttttcctggacctcatagtcatcgtagatgatcgcgttgacaaccctcaacagacagaggacaatatcacgccggcgagtagtgtcaagaatctcgagaattggcagcatgccgtgagcactgatgatgatgtttttagtctctgggaggtcacagaaaattgtgaacaattgatcagaaatctctgcaagaacctcttcgtcttgggatgttttgagagagtccacaagaccctcaacttggttgcgaagacgtgcgtatttatcgcgcgcaatattttcttcgaggtcgacctcatcaaagccttcttctaattgcgcaaaggggtcatcttcgtcttcttgatctcctagccaagagttggacagcttcgagttgagcatcaatgtactttgatctgaaccatcgtcgctctctgtcagatcaagggtagcttggtcggctccaagaatatcagagaagtcctcatcgttctcattctcagcaaacctctggatctcaatggtagagcggtcgcgcttcacagaaagctgtttgcgcagctggggatgctgaccaccaaaatcgtcatctacttggttgtatcctatgttttcatgaatgggtgatgatggatcatcctcggagtcctggaaaatgttagaataatacggtgaacttatagtcttgccggagactgtacctgataaacacccagctttcgatcgagtacatcctcattggccataatgagatctgaataatcatcgacagagttctctttatagagattggtcgcacgaggaggcggacgagtgcgtctcggcatcggattttgggagaggattgggacattttgcagtgcagaaatagggacattggatccgggctggtagaccgcagggctttgagacttggaaggctctactacattatgtttgatgggatatgggcgaattgtctgcaagtcgtcgtccgagaagcctgagttatcctcaaaggggtcagaactatcatccgatttgagtatggtcccatcgagtgaagcaaaagctttaagtctctcagaagagagcatgccaccgaagttatcatgtggccgtagatgcggcaacttgagtgcgctaggagagattgcagtagcaaagtcatcgtcccaattgtcatcccctgctgagacaggtgagcgaaagcgatccgtgggtttcatagaggttggcgatggcagggtgtcgaccaatgggttattccgggtagatggcaggcctgaagtactggggtggtctggtctctgcttcttctttgaagtccccgcttcgggggaccgcaaagcctcgttccattcttggacactcttgacggcttcttcatattctgtggactttttggggatcacagattcggttctgcgcgcatttacaatccaaggatgtttaagcaactttcttgctgagactcgaaggttggggtctttctggaaacattgcataaggaagtctttcacagcctagataaaagtcagtcttgcatgcatatgttgaaacgatcgataaagacgtaccggcgaggcaccctgcgaaaatggagggtgatcatcgtttacaatacgaaatagtgctggcataggctgcatgttatgatacgggggtttcccctcgagtagctcgatgacagtgcatcctaaactccagatatcggaagctgttgttgcgcctgaaagctcgattacctcaggggccatccagtacggtgtaccaaccacgcttgattcactcaagcccgtggtccgactcgccacaccaaaatctgcaagcttgacgagtccttcttttgtggttagaatgtttgcacccttgatgtctcggtgaataacaccctgttcatgcaagtagagtaaaccatgaagaacctgggacatataaagacccacaaggttctcggggaaacgaccaaagttcttcgcgatggaatgcaacgagccattttcgcaatatctataagacattaattctatgttcccttgaatttgacccgggagagacatactcgagaatgatattcagagtttcgacggatttcacaaatccatggtacttcacaatgttcgggtgctgcaagaatctatatcagtacggtgtttgttgacatagcttgacggggttgtctcacatcgagatttttgagaagatcgatttcaagctgttgcgtcgcatgttagcagatcagacgaactccgagaacgattagatcccataccatgataacgcgcaattcactcttgggaaggtctgtcaacttgatttgcttgacagcgacagtctccccagtattccaattcaacgcgcgatacacggagccgaaagctcctttgcctaagcagtctcccaattgctagcatcaacacccaatgtcagcatctgcccaatccatattttgcggggaaacagggcaccatattcatacgtagtccttgagctctgcaacatcttttgccgacgacttcaaaactttatcatccttcggtttctcttctcgcttcgtaggactcgttccgactcgtgtcaatcgcggctttatcggggttccgggggttctcgaggatggggtgagggggcgaggctgctgcccttcgctcccttcgccgggccgagcgaccatgatgcagcaagctaggatcaaatgtatcctagtatgtgttcgagttggctgtcggtctcacgatgtggtttgatggagggggtggggtgaaagctgaggaaggaggcaaccttagaagagctgatcgcaacggtctcagaggtcatgtccacaggatctggcaaacataattggcaattagtccgagtctatcaaggcacaaacaagcatcacaagagacgttcgcgtgcggtcgttgtggggaaagtctcaccaagtgcacattacagcacttcagctctcacgccctagagagctgtttccacgacaagtcgaggtgcatgtaaggtcttcagatggtagcaattaccatgcagaattctgaagaatagcgacctagtagaggtgacaatagaatgtgaaagagggttgttcgcaaagaatcgttgttgttttgaactttcgttctccacccgccgcatcatgcaggctgtgctggacaatcgccgatcagccctgccataccattttggtagatttttattatttgaccaaaaggatcacaatatcttgatgtatagctgtactttactaagaggaatgagaggtagaaaatgaaataacgcttgttgttgctgtggggttatttaccgctatagatcggggaaatccaatctgatctatacagggtatcatttttgggcacggagaaggcgcattacatctgaaacaaggtacaaactaccagcaataacaagaggacccccttgagactgctcactagcccaccgaagggcaggcagtaaatctccttcgaagctctggacttggccaatattttggatagcttcgatggaggaggcaagctctttggcgttagttggtcggacccagggcatcccgtccacgggaccaaattcggcggtggcgactcggtctccgggccggataatcgaaccaaaaaccccagctagatcctttccacttgacgcggcaacaacccaagtcacaggttggccttgaaaacgcattttgcggtccacatacttgccgagaacttcggcagattgagcattgtgggcaccatcaagcaggataggctctgcacggccaatcaaaggttggaggtcaattttttgcaaacggcctggccatgttacgtcggccagatatggaagcaacgagaatgcatccatctcaggtcgtagttgagaaagggcaagacgaagtgcggacactgcgcaacacatgttttcttgttggtgaggctctagatcaagcttctggaagtaagatgcaagtgccggaatttgttcggaaaccgttgcgggagagacaaacaaggaatcaatacccagttctcgaatgcgtgccctcacagtttcaatcacttccggactgtttgtattgtctaccacacaagggactccaggcttgaggattcccgccttctcacgggcaatctccctaattgttgttccaaggaaagcctggtggtccacccctatctttgtaatgaccgagacgagaacattattcaagatatttgttgcatccaggcggcctcccatacccacctcaaccacaccgacttcgacccgttcatggttgaatatctcgaacgccgttgcggtcaacaactcgaattcggaggcaccgatgcctagggtttgatctcgtagtctgacttggtcttcaatctgtcggaaaagggattctttgaccactttctctccaattgtaatacagtcccaccgatcaattaaatgcggggaggtgaagcggccacaacgcactccgccggtggacagcaaatgggaaaggtaggcactgatagatcctttcccgttggttccagcaatgtgaatggccttccatgagagcgtagtctgctgaagcagactcgcgacccgactcaatcccaactcaatcattcctccaagtgtgacgtgataggaatttcgaggtcaattgtcgaggtcaattgtcgaggtcaattgtcgaggtcaattgtcgaggtcaattcattatcgcccgaaggattagggagcgacaagatgattcaggatttcaatgcttcattgtcaataagtaaagcagagcccgaatgcgcgtagcccaccttccaaagtcggagcttaatcggaggaataaccccacgtgacattctcattcgcatacttccgatatgatgctctccgttctttactgacaatgggagaagtttttataatatccacccatttaccagttaactcaatcaagggcatttatacttattgattgtcaatcgagacattgcacgaataggctattgaaagatgtctagacaagtcacacgtgacctagccattctagccatcacaacctcaggcattcacaactctaaaaatccaatcgatctctcccgtctccatctcccatctccaccgttatcgcatgtcgcgtcctaattccataattgccttttcggtctttatttgtccttatttattaaacctctttgtttacctgcctttctttctgccccaaaagtaaaatgggtatcccgtaagtcatccattcctcacgtgggcgcgcgaagctatcgcatgcgccactgtttcgaggcataatgttgacttgatctacagtatgtggcgtgagcctcccaagtccgaagcattcaagtccacatcagaaaaggacacttctgctactgcacgctcatcgattcgccgagcaccgtcgcgaaacactagctcccgcgtgcgccgtgccgatatcctggcttcgtttcattcacagatcattgatgagctccgacgcggcgccgtggaacctagacgtgtgccgcgcttttctttcattgcgccgaacgggaatgtcgacaatgcagtggctgtggaaccggccgatcgtgtggccctcagcagctgggctcggtcggaagccgcaagtacaaaccgacagacagatacaacagtagccaatcagctgttcagaaatcatcgcgatcaagccttggccgagcttttcggtcgcatggacggtcagcccggtaacaccaatgccggtccttcattgactcccaacttcgctcccgctatcgcataccacaccagcgcttcgtcgactccttcggacagcggccttcgtctcccccctatgcgtgagagatacaacagtgatcgcacctctaatacctcattcccacccgagatccctgaataccggtctaacaatacacaaacccggccaaaccgagaccccgtcgtagacgggcttggggatcgccaacgcagtcccagtccagacgaagagcgggaaagcgttgtgtgggagactttactctcaaccattgcacccgatgagactcttccatcaactaatacttctttcacttcaacttctgctgccgttccagatatttcgcgcaaccctcgtcctcgcagctctgtcaacttgacgcagccgatgaccgcggaagctgctcgtactcacttcggacttgacccttatcctgaccaactcaatccttgcgacttctcttccgatgatgaggaacctccctctactctccaggaattcattggacgacgacgggcaggccgttatcctgatcagcattcgactatgagcaaccatcctcctgttcctatccctacaatcatccctgcaagcgttcttgctctctctgacgcgcgccgccaaaattcctctctctccgatcgtcaccagaacgatgacctccaccacatgcaggtcatcctggaccgacttgctcgtcgtgaggatattcccgacgactggtgggctgcggctggcctcgcacgcactctcgaccgtggttccagtgcgagcatggactccactgacaccgagggcgcatcccgaaccaaccgcgacaattgaacactgctagtcatgtggtgatgctgaatgatacgagatttgatattggcgatattggaaatgggcgttttccggcggatctcacgggtttttaatttgaatatcggcgttgacaggtcctttcgaggctgctttgtaatcttacattttccggtttccttgtcgattattggacaaacggacacgaacggccacctcgggggtcttttcaatattatctgtcctcaacttttcccttctgtaactttttatatcttcggggattctgattcttccactgtccagacataaatagaacatatttactttcggtgcctgccaagtccagtgacgtatatctctcggagtacagcagtccccacttggagagccccgccaatatgtgaggtcgggggaaattatgcttagtccaacaactcaaagaggcaaataacatacaaagtagttagatccagtgtcaaaaattgccttgtacactgatctgcaacactcaagcgtactacaacacgttgctcaaaccaattcagggcgttccttccctcggatatttcttatcatacacatttgatcccagcgtgaccactagccaactatggatcaacaggtagaccgactggtcaacaagacctggggtgagtagatccaagaacaagcacaagctcgaattactcctgctatcccaccccaccatcaacgctacaaccacgtccaactaacaacccatcccagcaaaactctgctcaacagcagacgacgcgcgcctaatgatcgccatcagcgggattccaggatctggcaagacaggtctagcaacgatgatggcagcgcggattaacaaaatctacgcctcggaaaaccccacaatgccaacaccaatagccatcgccctcccaatggacgggtaccacctgacacgcgcacagctagccgccatgccggacccggtgaatgcggcagcacgacgaggtgcggcgtttactttcgacggcaagaaattcctcgagcttgtgcaggctctgcgagagccgcttacgggccggacgggaagtctctatgcgccgagctttgaccatgctattaaggatccggttgatggggatattgccatcccggcgagttgtcgagtgctgttttttgaggggaattatcttagcttggatcaggagccgtggaaaacggctgcttcgttgatggatgagctttggtttgtggatgttgattttgaggttgcgaggaagaggttggtggttaggcatgttaaggcggggattgcgagggatgaggttgaggcggataagagggctagagagaatgacttggttaatgggagggagattgtggatcataggttgccggtgcaggaggttgtttctagtatttttgatcctgtttgggagaaatgggcaatgtgatcttgacgaaggctatgatgtacagagttattactatgttgatttgagtatccttgtgttattaggaattcaaaacacgtccagcgactatatccttggcataggaaatagctcggacggattctgtgaatttgtgaaggacaaaaagtccgatagaaagatgatagcaaagtgggttttaaagtcgtactagactttctcatagagacatactcggtccctacgatgtatacatatcgatatgctctacagattgcatattttgaagtagtagtaacacactagctgtttcgcgagatcgatatccacccatcttggtctatagttatcgagatactagctctataacccccagcactagcgtaagtgaaacccttcttaactcgacgtttagatactgatggatcccggcttctcctatcatgacgccgatttgactatgtggtttctagcccatggagcaaaccctaaccagcgatgtggtaaagatcgcaccacactgtctaccgcttttcaagttgccagcttcgagatcattcagaagcttcttgaacacggtgtcgatgtattccaaggccaggtgctgcattatgcggcaagacgccgattggatgatcgactccaagttctcgatttcctccttgagaaaggtctaccgatcaacaacatcatgtttctgtactccgatgactattacgccaatatgtttgacggtattggtactccgcttcattatgcggctgatgcgggtctacttgacctgtcaaatatctggttgagagaggagcgtcagcaagaatccgagatcccgcaggacgaatcgctctcaactgggccgaattcaacaaccacaaggccgtaactgattttttcgtccattgtctgttgagaatgaccaacatctcgttgcacaatttacagatgaacctgggcgccactttacccttaatggaggaattcatggcaaaaaacgactactacttcgttaacatttagttacatgatttttcggggtttcttgaactcgttatagttgaatagtccgatatatgttcattctactatgacagccgatcgtctgacacacaggcgcactggttatccggatatatgttgtagtatatcatcatccgcagtacactcccgcaaaaggaacatcatcaaggcggcaaaatgacatcctcatcttatcaccacctcccatcatcgaccagagatcgaagagggtatatatccaacatttcatctaccccggaaatttgtcatactgatccacaatcgggcatgcttcaagaacctttacacatcgaagctctttatcggaataatccaggcttccatcttcaagggtctcgattggtgcacctttcagcgtttgcagagattcttcattgataatcatgcacattcgccatttggtccaaccgtcacgcatgccttgagtgtccacccaggcctcaaataagcacgaattgcttcgagagacgccccgttaaattgcgccggattttgcaagatggtcgaccgctgtttggcccagatttcattaggctcatttggtggatattctttggtttcttggaagaattcttgcttgaaacaggcctcaataaaccgaatagcgtctggaaatagagtatctgaatcagcggagtaggtagtgcgatatatgacaaatccccagtctgggtaagtgccgaggttatctcggagctcgtccatgttgaattaattgttttaatcgcgattgcgtagaatttgagttggtggttgaggaggaaagagatgaggaagggaaagaaagtctggagtcttctgccaaattgtcgttacagctccccaaccacgaacccacatcaccaggcttgggacctgctagatctgttacatggttggcttcgtggcactcgatatgtgtctagcttggacagcgaaccacacaggccaggagaaaatgatccgtctgtatcaagcatgaagaaataactatatctatcctatattccggcactttatcctagctgcagacattatagattgtactcagagtggtgtgcacgagcaagagagagaatagatcactggcgtatggaactcaggatcgagaacctggaaccgtccctatggggatcagctgtcgaagtccatataccaaaagtaaaaagggtacaggtcagacatgtgaaaagaattagttcgatgaacaagcacagcgactactttaattaagagaaagagtccaaacgcaaacagcgtgtcttaccccacaaagaaatggcaaaaaaggacattcccatccagtgcctggggttatactcccaggtcgccacttaggggatcataatgcttaagtaaccccaaccagctttaccctaagatctagtcgtccccaactgcaggcacacattgtcggacctccacagcgcgcgtatcgatctcgcgcgctccagcgggtccagaccggtaccagcaaggtgggcaattaggggagcataattggaacatttatgaccgtgcactgggtgggtcgaacgctggcagctaggacctaaactagcattgaaaacgcatgtcaacacactcagccactgggggaatgtcggttagggggaaggtgttgctatgaaatatataggaacaaacacttcctaaaggggaaggtgggtccgctccaccacattgcttatcacgtgatgatgtctgaatgtactatgaagaatgaatccttgtaatatacatcgtttaatccaaaaaggtatagacctacacataatgaaatcgtggaatggtaaagcgaagtggccgctctacttttcacttctccctcacttgaccttttctccttctctcacttgaccttttctccttcttctcgccttctcatcttctgttgggtgcccgaactttcaacttttaggacgagtccggtatcctcctcataaccggcgaggcgtcctttccacgcccttggtgcggccttattgatcatcctgggccttttcctcattcagagatacctccctcgcgcgtatcaataccctttcatacacctcttagtcttcgactgaagggaagcgagaaccggtgaacaaggatgggaaccgtctcaacacctcttactttatatatgcctcgagtgcataaagcagatacctggaagttcctgcgcaacttagacagcgttggtctgaacttgaacctgaacctgaaaatcgtcgaataccttcaagaacacctcaccatggtttctctcctgatctaccagctttttaccccgagctattgacctctggggatccccggtgtaccagaagcttaacccacacttcgaagcccccggctataatgaataaggtccttcgatctaagaatgactttctgactgattaccaagaagcttccatgagacagagctggttttttcctcgggaccacacatcggttttcttcgcctattgtcgaaaatattatgcacacaatgatcttgactgtttcgaccagtcatatatctagtatcggcgttgatggatgctagtattttcgcgattattgagtttatggatttaaggctggcttcaatcaatgtgagggagcatattacatagcttacataagctctaggtggttacaccgagagcgtacagtcatgtttcatgagtatttgcaccccagtacttcggggggggggggggccttnnnnnnnnnnnnnnnnnnnnnnnnnnnnnnnnnnnnnnnnnnnnnnnnnnnnnnnnnnnnnnnnnnnnnnnnnnnnnnnnnnnnnnnnnnnnnnnnnnnnnnnnnnnnnnnnnnnnnnnnnnnnnnnnnnnnnnnnnnnnnnnnnnnnnnnnnnnnnnnnnnnnnnnnnnnnnnnnnnnnnnnnnnnnnnnnnnnnnnnnnnnnnnnnnnnnnnnnnnnnnnnnnnnnnnnnnnnnnnnnnnnnnnnnnnnnnnnnnnnnnnnnnnnnnnnnnnnnnnnnnnnnnnnnnnnnnnnnnnnnnnnnnnnnnnnnnnnnnnnnnnnnnnnnnnnnnnnnnnnnnnnnnnnnnnnnnnnnnnnnnnnnnnnnnnnnnnnnnnnnnnnnnnnnnnnnnnnnnnnnnnnnnnnnnnnnnnnnnnnnnnnnnnnnnnnnnnnnnnnnnnnnnnnnnnnnnnnnnnnnnnnttcttgcttacttgcttgcttacttgcttgcttacttgcttacttgcttacttgcttgcttacttgcttacttgcttgcttacctacttagttacttgcttacttgcttgcttacttgcttaaatggcctgcagccggcatagtggctataccgcggtttaattatttaattatttaattggttgattgtttacttggttaaagggtggctacgcaatggccgcctaatttagggtaacgtaattcccggccgagctgcgcagcccagaacacatacagtcatgtttcatgagtatttgcaccctagtacttcgggggggggccctattttctgccggaaaaacttcgtactcactcccagccagtcgcactatgcgggtggctcctataataataggaataggcaggcggtattcacagagcggtcaatggtagaggtaccggggtacaaatactcatgcaacgccactgtagacaacatcaataacaagcatctttaccaccaccaagctttttccataacagattggtagcatgtccaggccttgacatacccgcgcaagatgccgacattctacagctagtcccatgggcggcaatgtacggtatcattgactctttcgggaatgaaaatgtccgccgacgcaagcgcgcgcgccgagagaaggagcgccatgataattctatatctaatacacacattccgtcctggagaagggtcgccatatcgaagcccctctctggcccgctacaaaatacagagctgcgcttccgtatcagtcagattgacagtgccccagacgtcgtcggtcctgttatatccctcctgctggcagtagaggccttgtttcagaacgtcggtggctctaggaggctggaacgtattgcctctctaggccacgccggcctcgtcgacttccgcgcgcgtttcgtcgagggagacccccgcgttacccgcgctatgcgtgaggggctcggcacctcactgaacgccatccgcgacgccatagcatttgctgagggcctgctgctagttgaccgatgcattgagatggtaaaggatgatgccgtaaggcttgaggtcgaagccatagcatccatgatgcgacctccaccggaaactcctttgcacgaaggccacttgatttctaactgaggctgccgaggacggcagcaccctttccgaagggggcacatgtgagagagcatattacatagcttacataagctctagttggttacacctagagcgtagacaacatcaacaagcatctttatcaccaccaagctttttccataacaatcaataacgcctgtgtgcggatcgggaggtttaccagagaggccgtgaatggttcaaaacaattggcaagcgagttcggaagtcacttttcccacggagaaaggatagaacaagagattcaacttcttatgagaatgccactatggtttagctctcgctaagtttgctgttatcattaccattcttcgacactttcgcggctttttgaccacattctgggattgtctcttgcttgatttcgtggctttctccgtgagtgagacctgtatcctatgttctgtggctaaatatactgtgcttacatttgatgcacgtagttggtcttgagatgcttcgcctcccttcctccgaggaagtttatacgggcatgtcacgaccagagccgggaaaaccccggataagcacatcaattctcgaatgtgataacccttggctgtctataactccaagagtatataatttgttacactcgaggtaactatgggtaactgaggttattaatagagctcgaatcctctaatccccatctggatccgccatctaagacatataaaattagtgggaaaaaaaagaggaaaactctcatcttatgtagaaccgtacagaataccattaaatgaatattttcaaattttacctcgagcaccactgtcattgatacgctcacaccgtaagaggaacggaggcgcttctctcctgtatccggggacaggtccctgacgctaaacctctttgggagccgaagttccacaagccatggggaactagtatacggtacgaagagaaccgtattgtaaagtacacttagtattgaacacccgcaatgaagtacattactgtacagatatgaatgtaatataacagaccctgacccccatcgtggctttgagattgtgatgaaactgtggttgcccgatttccccttcccccccgttttcctctggttgagaccttatcctccttaccacttcgtcactctttgtcttccactttcccacactctttacagtcgctctttagcccacacgttcttttactctagactcgctgtgcgatcttgaatccaatcccttatccaatttccaatttgtgatttcgatctccgacctctaatctttcaccatgctcttcaacaagtctatcttcgccgtggccattgtggctttggctaatgttgtgactgccaccaccgtgcaaaccccggcctgtgttctcaaaatcatcgggtatgtcccgaaggaatggaaggaatgctagtggagtcctgagctgatgacatctagcaaccaagccaacccggccgattcgaagactatctgcggctcgagcgctagcaagatccagtctgatatttccaagaactgtgccgatagccaggcttccctgaaattcttcgtcaacaactgcgccctgctcggccacaaagttggtaaggatcgacacatccaagagcatgttgcactatatcactgaatcggttacttattatcttctctttagtggctgatgtttccaccactactggcacctctgatatctctactgccaccggcactgctgggggctctacagccaccggcttcgtcaccgctgtctcctctgtctctgctaccaagactggtgcttccgttgctactggcactgcctccaaccctgctactggtacctcggcgatcagcactggcaccgcctccgagtctggtgtcgtcgcgtccgcttctccgactttcaacgccgctgcgtccgaccgccacttctccgccaccagctttgttgccgtggtgttcctcggcgctgctgctttgctgtaagaattcagcattaactgacagcggctcaacgtgaatatcgatgtgagcatattattagccttaattttgctcctttcgatctgaattgaatcgttgttcagggatcttgttcgaattctgatatgttgctcgtctatgtcaatatttgaactccgtgaacttttatcttcttacttgccaaaatcgcattgatttatgtgctattcacttccccagaacaattcttgaaaccgccgaggtctgctcaattgccaatcagtcggtcgatgtaaacagattcaaatgaatcagtgaccaaaatgccaggacattccctaatagaagagaacgagcaatacggagtacatccgaagtactcctgcggtcatccccgcacctcttggccccttgattaaaaggacgatgtagatctatcacattgacgtgtacaatgcggcaaggctccaaggttgggatcgggcatgatgttgactaagacatatggataaatatcacgctgtcaaaaatcacctcaatttcgtaatgacgtttaaagatcatctgagccggaatgcttcaggccgctcggcgacagctcttccgttgccatgttgccatgcgcgatccttcgcgtgttcacgtgaccattcgcgatctgcagtttggctgcaaacctaatctcaccgcctattctctagtcacaccgccttccctattctaactagaaaccccacgctaaggccattcggatcaagacgctaactgcaaatggtataaatggatgtttctgcctggcaggatgcaggtttgcaaggaaaggtggacccgatcttggtaagctgaaaaaacgcgggcaacgcgaaaagacaacgcgtccactcggcaaccaaagattcctctgcccctctgatctctttcttcttctcacacccctctacgggcttcatacattcatctttccccctttctctatattctaatagcatctcaatcctcctactactttgactttgataccctgttctcgtctttctattatttcaactaccaacttatcactattcaaaatgtttgtctacaagagaggtaagtgcatatatggtcttctgatacacggaagcattcgtggcaagagatagcttctgctccttcatctcgccacagctacctggctttgccacgccactgtttttggatcgacggctaacgcggatacaaactgcagatggacgcaaggaacgcgtgcagttcgacaagatcaccgcacgtgtctcgaggctctgttatggcctcgaccccgagcacgttgatgccgcagccatcacccagaaggtcatctctggtgtctaccagggtgttggcaccgtggagctggacaacttggtatgttcacttgcttgccccgacttatggcattatgttaatgtttcaatcctaggctgctgagactgctgcatacatgaccgttacacaccccgactacgccattctggctgcacgtatcgccgtttccaacctccacaagcaaacaaaaaagcaattctccatggtcatctccgatctctaccattatgtcaaccccaaaaacaataagcccgctcctatgatctcagatgaacactacgagatcgttatgaagcatgccgaggagctcaactcggctattgtgtacgaccgtgacttcaactacaactacttcggatttaagaccctcgagcggtcataccttcttcggattaacggcaatgttgctgagcgtcctcagcacttgctgatgcgtgttgctgtcggaattcacggcgaggacattgagaaggccattgagacataccacttgatgtcccaaaagtacttcactcacgcctcccccactctgttcaatgccgctactccccaaccccagctcgcatcttgcttcctggttgacgtgagcgcagacagcattgagggtatttatgatactctcaagacctgtgccatgatctccaagaccgctggtggtatcggtctcaatgtccaccgcattcgcgctaccggttcttacattgctggaaccaacggctcctccaacggtattgttcctatgctgcgtgtgtttaacaacaccgcacgttatgtggaccagggtggtaacaagcgccccggtgcctttgccatctacctggagccgtggcacgccgatgtcttcgagttcctcgatctgcgcaagaatcacggtaaggaggaggttcgcgctcgtgaccttttctacgctctgtggacccccgatctcttcatgaagcgcgtcgaggccaacggtgactggacgctcttctgccccaatgaggcccctggcctagctgatgtctacggtgatgagttcgaggctctctacgccaagtacgagcaggagggccgtggccgcaagaccatcaaggctcagaagctctggtacgccattctcgaggcccagactgagactggtaaccccttcatgctctacaaggatgcttgcaacaagaagagtaaccagaagaacctgggtactattcgcagctctaacctgtgcactgagattatcgagtacagtgcccctgatgaggtggctgtttgcaacctggcttctctcgccctccccacctatgtcgactctgcgcgaggcgagtatgatttcggcaagctccacgaggtcgtccaggttctcgtgcacaatctgaacaagatcattgatatcaactactaccccgttcctgaggcgaagaagagcaacttccgtcaccgccccatcgctctcggtgtcaacggtcttgctgatgctttcctggctctgcgtctgccgttcgactctcccgaggccagacaactcaacatccagatcttcgagaccatctaccacggtgccttgactgcttccgccgagattgccaagaagctgggtccctatgagacttaccctggctctcccgtctcgcagggcatcctgcagtacgacatgtgggaccgcacccctaccgatctctgggactgggcctccctgaaggccaagattgccgagactggtgtccgcaacagtctgttggttgcccccatgcctactgccagtaccagtcaaattctgggcttcaatgagtgcttcgagccttacacctcgaacatctactcccgccgtgttctggctggtgagttccagatcgtcaacccttggctcctgaaggatctggtcgacctcggcctgtggtccgacaacatgaagaaccgtatcatcgccgatggcggctccgtccagaacatccctaacatccccgccgatatcaaggccctgtacaagaccgtttgggagatctcccagcgcaacattctacagatggccgccgatcgcggtgccttcatcgatcagtcgcagtccctcaacatccacttgaaggagcccaccatgggcaagctgaccagcatgcacttcgccggctggaagatgggtttgaagaccggcatgtactacctgcgtaccatggccgcctccgcccccatccagttcaccgttgatcaggagcagctcctggtcgaggacaccaacatcgctcgctctaagaagcgtactggtgctgccggtgcctccgtttactcggctattccccgtaccaatggtgctgagcccgctatcgccaaggccgtcgcccctgtcgaggaaacccctcgcagtgtggctgcacctgctgtttctgctcctactgccgtggagaccgatgaagttgctgaagctgagcctgaagatgccgaaagtagggcaaaggagggcgatatattctcagatgcggttcttcagtgcagcatcgagaacaaggatgcctgcatcatgtgccagggttaagctttctttccctttaatgcttttggatgtttccttggggctttgtatatggccatgtcttctttcctggcttctcacgtgtactcattatgattttgatggacttttctttttctttgcgtgtttcggcgtcggttcaagatatttcctggattttcttattattacttcaataacgtgttagttatgttcttcattcttctttgtaaactttagtacggagtaggccaagtagatattccttgttgtacaggactagtctcagccttgtatattcaaaccctattatctcattcctaattttaaattgcttaaacttggctgattatttgagtagagctgtgaaagtagaactctcaaatgtcgtttggatgtctaccttgaggcaaagaagagatgatcgagtacctactattggtaacttacttgcaagaatccagccttattgtatataccatacgatttgtcccactataaactgtttatagttatatttacaagcaaggctatagagaacaacaactatgctatcttcaacccattgagtaaacacatatcaacactcccgcccattagatgatctatcttcgtataggccataacatagccgtatcacaacgcataccacccgcgcttcctttcaccgatatggccggtgaggtaactcagcaagatgaggggtcaagctccctccatgcacctctttaggcggtgatggcgggacattatgaaccacccaagggtgtattgtttccggagatatcgttttgccattggagtttcgtatcttaaagtagagcagcacacccaaaatgcatagtatcgggagaccaactccgattccgattccgattgcgatcttttcggtcatggctaactgggatgtttggccagaggctgagatcgacagagacgataaggatgacgatgacggtgaggaggagagcttgatggtcgtatgtggcgtatttgtcgacgcggacgcagatgcagatgtggatgttgttgaagacgcagtagtgctggtagtggcgacaggctcggtgacgttgaagtatgtggaaacaaatccacccttctcatctgggttgatccagagaaagaagacgtttgagtacgacagatcaaatccgtacacctgaacaacccacgtgaagttggtgacatagtcggtggaatgtattttggctagaagacgtgtcaatcaatcatcccgtattttgcagccttgggagtaagtaagtgtcgggaaactaacagaaaatatttccctggctggcggcacctgtctctaccaagctttgctgccagatagagacgttgaatacctcaagcgtggtcttccatgagacaactagcttgtcacctagtgtgaagactggattcacgccagtgttggaggctggatttgtgaaataattgtaatcgtcacctccagccacgagagaagcgacacctgcgaggagcaatatgagaaatctgggatgacgcatgacgaagcgagccacaaggtcaagtctgagaatcgatggggacccgggaattggcggttatagttgatgatatatgagtctcgcgctggtgggctggggggggnnnnnnnnnnnnnnnnnnnnnnnnnnnnnnnnnnnnnnnnnnnnnnnnnnnnnnnnnnnnnnnnnnnnnnnnnnnnnnnnnnnnnnnnnnnnnnnnnnnnnnnnnnnnnnnnnnnnnnnnnnnnnnnnnnnnnnnnnnnnnnnnnnnnnnnnnggggggaatcgaatcatactgaaaaacacacggtccccccagccagagcaggggtgtagatattatgaagaggctaacatgtctctgcattcatctcgtatcgtcgaacggtgagttggttgttttttaagcgccctgagggcaccgggtcgaatttgtgggcaggggctaaggcaagaggccgatgaacggtgcaataagatcccactgattgtttgagtcaagttggatctaactgtatctgtgatcgactcacgctaaagtgacggagaaggcacccgatcagtctatcacggcaaggatagctcggaagattacgattccgaatcgagaatgattgtgaaaacagtaccatgtggatggtacggagtagatggcttctgatgaacaccattaaaactgcctaaaggtattggagtgggccacagtgggctttgggtgccaattcataaaaacctggtgatggtgccagaattagaataggataacgtactttgtttccagctagacgctcagaaacgccaccttgttacatctgatgccccttgggctgaatttcgaaatattccatccttttgttcgtacacggaggagcatactctaagaatgattcccaaatacgtatttagtgccagattgcagagaattcaaaatccacagtctatttcgtacagagtaatgcgttgctattcagtttctctcccattgactagttcctgggctgagggacgtaaacagcccccttttccatcgtgatctcttcaggaataacatccaacacatccacgtcgtcccatgttgcatgaacggtccgttcccccttcaggatacggttgatattaagcattgtgctgtacttcaccccccagctaaaaaagccctctccgtcgccggtctcttcgtggatatcggaggactttgctctcgatcctgcctgatggaagccccccgtgatcgatgggtaaggtgcaaagcaccgcaaaaaaccattaccacacatgcgtccgagcgagacgtcaaactgcgcaccaatgtcaatttcttccgcaagaccagacggatttaccgacagcgccgcgaggatccgttgcgcaccgcggtagctcacagcatagaacattgagcaggcggcgtcgtttgctgtgcacgtaagtcgactgtgatcgggtcgctcgtggccctcgaagaccggagggtcgcgccacagggggagaaagcgatggggcattgggatggtcggatcattcggtgtaaggtagaatggcagatcagtcttacatgacacgccgcagtggcctagccagaggatgtcccagtcgtcgccgtatggcgactgagttgggactttccggttatgtcgaagctggagctggagggttcggacggcgtgagcgaagctctgtagctgcactttgattgagacatcccagtcggcatcgtcttccatgataatcgcactcgctaatctctcctggacaattctaggggatcattaggcgtagtcaaatattgcagtgtcaactacataccgctggagtccgttgatatgcgcccgtcgagcagcgtactcggtcggtttatggccatggtcccagttctgaaacagtcagtcatcgtgcgtagtgtgtaactctagaaagcatacatatggatatgatttagcatctatttcacctggagtcacgccgtcaatccaatcgacgtggaaattgctgacggaagagcctaggacgatattgtcccgcttgtcaggccggctgacaaggttgatggcgaagactttttgaaactaaatagtcgtgagccgaggtatcattaggtgcagctcgaagtgggataatcaccccaagggtttcgtttccgatggcatcgaagttatcccaatcatgatagttgctccagacctgctgggtaggggcgtccgcgccgtgaatgctctctcgtaggttgaaaaggatgaaggcaactccgaatgcgaccagaaggagctgtacaaagcgtaatcggaatgcagaaaagaccatgctcgatcgtcatcgggagacaagataggacgcgttgaatatcccgagcgtgatggaggcgaccgtgatttctgttttcccccagagccgccgaaggtgaatatgtgggctggttatcgacaggggagggagagactagcccttctaatacataaggcgtattgccgaagcatggttggtcgagatattcgttggatccccactgtgatggacttgactagccgcatgaactcgggatttgagggcacatgagtggtatacaaagcgacagtggcgtaccccggtccatgcgctggcagcattattagtactaaatacggagtagacgttaagaatgattgacatggagagcaccgatttaccctgatggccgcgtgggtccaatgatcggcccagaattaccgctggcccccgctgcggcaaagggtcaaattcgatgatgcttagtaatacatatatattttcaccgccggagtttccgtcttgaatattttaaaagtcacctgatctatcaccatgaagcaatttaaattaatccaactaccaccaataatagagataatttgattccgaaaaacctagttgaataccgcctaacggagggactttaattgctcaaatgcgaccgatatttagtcctagtgatagcccaattgcttcgagaggtagtggatcaggtgacatggatattacggtcgcagatcaggtgatctctaaatagttgactagttagatcaggtcaattaaatctacggagtaagcctccccccaacctagcttatccacgttgtatacatgtacgttgctttttggtgaaaccgagtacatattgttgttccatcaacgaagattctacgattcgcgtggcagaaagaaaccgccctgcaggtgcgaatcgacggatttgtaatcatgcaaagtgcccaggtgcaactagccctaacgcccaagcgcgcaaaacgggccacgaaaaggaggctgacacctatattgtaggcagcacctttattttatgaacgagaaaggaatagattcaaaacgtatttcaatatgactctcgggcagcacgccatacgtaatccgccgtcactgcggagtacagctgcagttctactccgcacctcaaattcttcaagtctccagtttcattgccatacggagtatgccgtctaacaatcctattccggggatgtcttcggtcgagtggagcagaggggactggacaaagtggaatggaatagtacggagtatggatgccaaccaaatctccgagttcataccgttggtgccacagggtctaggtccatggttgggcctggaatgtacacggaacaggtattggatgtgtagtcagaactctaggtcattttgattgctcatggtaacatagtcagcaccctgatcgggttgttggtattgattatgcaggttctgttggacaatacaagattattgccctgtgccctgattagggctgagctggaagtgagtctagacaagatcgatagctagagccaagtccatgtattcacacaataatctaagatcggcactattctctcactaaaaactaaaactcgaaagcccagaccagcagtggaggattccaggttaaaggattagattacgtgtataagaatggtatgcaaatgaaatctgccccagtctcagctcagctttgtctcacgcattgtccaatcgaatcggtattggcgcccccgggtcaatacaatacacgtcagactgttaaaaggctgcagtacatgtgtattctgaccagtcctccctggggtgcattgcgaccgtggaaatcaggatacacgtcattttcaaggcgaccgaagagatctgaataataacctttgtgaatccgcaccgtggaagagagcggatatggtatccccctaagaaacttcggaagaaacttagaaaagaaagaaaacgggtgctgtctctgattggcccagtagtcaggtacgagaggcaaaatatgtgggtcgtctgaccccagtaggcagtaggctcgtagcatcggttgaaacagccgtcggtctatccccagaggagattagggccaggagaaaaatggcttatgtggcgcacaagcccctcgtctctggttttcgttccaatgaggatctaccggggcatccggctcgggtactagggaagttagaattgtgatactgtcctccgtcctccgtgtgtagtgtccgatgcaggatatgaggacgacggagaagaatgaaagaaagtgagttgtccatggtacgatcgtggcttgatttggaccatgggttcaggcgataggtgggtccgctagtaacctttgaggtgggccagttttcctctttggtgccctaccgggggcattttataaagtcgagacccttccccccgttttctttcttccttcagtccattccttccttcccgctcactcacgttcctttcgagtgcccgaatcttcctgctgtgcagttgaatcaatcctttaaacaacttcacacaatacactccctcgagtctcttccttcacaatggctcctatcaccaagactctcgccctcgctggcgctttcttcgccttgactggctactcggctcccgtcgccaaacgcgccgtcgtttgggagaccgtcaccgatgtcgtttggaccaccatcgatgtgaccaccaccatctaccctcagtccactaccagtgctgtcgtgcctgtggttgccaccgccgtccctaccactaccgctgttcctgctcctgttgttgtagcgtccaccaaagagcaggaggctgcacccgttaccacctcgaccacctcctccgtcgctaccaccactgctgccgctgttcctactgtggcccctgtcaaggaggaggctgcgcccaccacctcgtccaccactactgctgccgttgtccctaccgttgaggccagtgttcaggaggctgcaccaaccaccacctcctccactgtccccactaccactgccgctccccttgctatcaccctggaggccgatgcctactccgctcccactaccactgcagcggctgagacatcttccaccgctgcctctactgctacccgtgctgccagcgtcgatgttagcagcagcggcggcgcttgctctgaaggctccccttgcgacggtgacatcaccttctacgacactgccaccacttccaccaaccccagctcctgcggcaccaccaacgatggtaccgtcgagaacgttctcgccctgcctcacggtatcatgaccgacagcgactgcggcaagaccgtcaccatcacatacaatggccagaccgctaccggtactgtggtcgacaagtgcatgggttgcgacaacaactccgtcgatctgtcccgtcacttcttcggcgagctggcccccatggacaagggccgtgtttccggtgccaagtggtacatcaactaaacgttgcgtcgaccgcgcgttggtgttgatggccaccattatgaatatgaacaatggacacatctctggtagattgcgcacacggatatggtcttgacgactcttccttttttttcccccttcttctcacttcactgtgatcttttttccccttctttcccggtctctccgagaatcaatcattcatcactcggagagactgggcctttttacctttcgtccactctcttgaccctggatctttttttacgatttcatgtgtccctagtggaccgcattcatattttccccattttcatgttcatagaatcttcttctcttcggagtcttcttgtgcaataccaccctatgatggaccccattcggccatatcacatatccttacgatccctgcgcgcatgctggcaagtcatggacggtttgattctcttgacgagacctcgaacatgcacatgcgacaggcaatgatgattacgatgatcacgctcgtgaaacaaaaaaaaggcatattgcaggagacggatcattgaatgaaacttgtttcgtttgactcgtgtttgctttactgcgtattcgtagtttccaggtatcatttggggagctgtattccgtattgcccctttccacttttgagactcccaaaacggaaatgagctagttatagcaatgcaaggctagtgactatcattacgggtccatgctaagacaacttctcatcacttctagtttgggatgttcaattgcgggcctctctgtccagccaagtgaggctatgcgtatagatatcgtctcaaatttggatctgctgagaagtgccggcgatctctctcctgtctatgatttagccctgagcctcgtcaacgactagcgatcataaagcccagcccaatcgaacattacatcgttcctcggcgttctaataacaacatcaatctgtgacttatgcgacgaaagactagcgctgacaccgaaaacaagtcagctcaaccaatttcaaacaaacaaacgaaacgagacgaaactcaccgctaggcgtccctgtcataataacacttcccttctgtaccctgcgcaagatacggatacgcgcagtcaagacaaaatatccgcaacatactcttctcgtctaatctccccatgcacactcgtcttcggcggtagcttactaggggcagatatctcgtcgcagtaacaagacacggtcccagcggcgcaaatatatcaaaccaacaattctataaaactgtaaaatggcatttattgacttcgtaagatcatctgcctgtcaacttaaacaagcagcagcagcagcagcagcaacatcatcataatctataaaacaactaaacaacagccatccacccacaatccccagatcaagccggtacatatggcttatcactcctaacaatataaacctccccagcgagaaccgcacacccaaccaccatcgaaatagcaataataggaagattcacacgggcaaattccaaactcccaacacggatatgcttcctcgccaaaatatcccgccacagcagcccagccagcgacgcactaaacgcagtactgaaagcaccataattgacaccgagagccatgctgtaaacggtagcccaccatgtgcgatcgctgatagggattccgctggcttcgtggatcttctgccatgcctggatgacgcgcgagaggaggatcgtggtgccgatatttgttccggcgaactggatgattagaagatgacgagttagcggaagaaaaagaggctaagtctattttctgttgtcccaatccttacattgcacagaatcacagataggaagcccattccaccgatactgccgattgtcccggtcttttcgacccagtggtcccagccgtacgcgaaaacaggcacccagcccttggtgacgagcgcctgtaccaggatgaacatcgtgaacgcgaagggtactagtgcgaatggcatgtgggagactacgactgtcgtcgtggggaatgtctcctgagaccatttgtagagatcggtagcgagtgataccaggctgcatggggcgctgtcttggtgatatggatatcctgggttctcctcgtatatcgttgattcggtggtttgtggcgagtccagtgtctgggtatatcccggtttcccattgtatatcgtcgagtcggtggtttgtcgcgagtccagtgcctggggagaacttgcacgagctagttgtttgctgtccatcacaacaccgcctggtagctgtagttctgggaacttttccttgtcaacgggcacagagactgacaagggcgttccgcattctggatcgaaatccttcgaggcgatatcactatcggtgctcttgagcgagatgtcgtagtctgtatgctcactgcggtggtgcaggcctgatgcatcatattgatccgcctggtccgatgtcaacgtccctggatccatcttttccggcagcgctatgcgttcgcgcatttctcgctctgtccgtgcttgctcaacctcccgtcgacccttcgcggaaatctcacgggtttcttggcgatggagccagccgaagacgagatcccagcagaacataacgaaagcagcgggtaatgtgacccagaaaacgggatgctctttgcctgatgcattgattgccaggagggtgataagcgtggtggccataatcaaccccccaaaagatgcacccttcctatctaagaatgggttcatgatctcttctagtgagagttgctttccctccttatcatcagcttcctctttctcctcggcggttcctctggcatgagggatgttgggattcacaggtgcttttttcttttggtcctcggacagctcgtgcattgtgatagagagaggaatgagggattcgtctgcgaaaatgatatatagcaggaacgggaacaggataatcgccgtgacgactacgggaacgatcatgttggccgtgtagacgatgaacttgatcttgaaagcgccggcaaggaccaggttggtggggttcgaggagacgagaatcgcagaggcgatgttggctacggcgaactggctgtggatccaggctcgggggtggacgatattgctggatacgcgggtcatgtatgcgaggaacgccgtgccggataggatgatcgggtcgtttccgatgaagctgcctagtccgaaaaagaaaaggaacaggtagaagaagagtcggtggccgaccttgcctgctttttggaggaccttgaaggccaggtatctgatgaggccggaggcgtcaatcgagatggcaatgtaggcgagtgtgaggaagaagaccatgatatcaatgggattgatgttgtctgcgccgactattccatcgtgtacctcttttcggccgattgccagaatcgcgagaaggaataggtccgctgttaaaggtgccgtgatgaagttcaatggaaagcagagtttcacgaaaatgggttgcttttgattgtatcgagggcgagtccggtgtggtattatgcgtatgacacttaataggtccagaatcccgtttgtgagccatcgaggcacgtatatagggatgtgaaatgggaaaaggacaattatatctgcatcgcaagaaacaaaagtaagtcttcgtctcacatcaggcctaaccagacttactagttataacaaaaataattagggtgatgattgatcgccaacttttgatttccgaagtatccagttcgtcgtccattttgaatgtttgcttctttttctgagattcacttcaagaatataatagctgtggtcgtgtcagcccctctatcgtacttccgccgtagtcaagtcatggtgacaaaataccagaatgcggaacaggagaaagttgcgtagcgagatccaatccttgcttttattgcagacgcatttctcttttgcaaaaagaaaatccgaaataacgcgacaaatatgacgatcttacttggttcctgttggagaaattttgtctgcgagttgctctccatccatatgcttgaatgcaagggaaaccaagaaattttcaaaatgcagagaaaccaagtgcactgcccctcataatcacatggacaagctcagatgattgtgacttgggccgcggagaggtgagcgccctgctaatgaagggctgaataataatatctctgtgctacgagtgggtttatggatggataaattaaggttatactagaagctgggcgagtttttttaatattgatatcataatgtgatagtgggatggacaggaaagaaacttccgccgggtctgaggacctgatgtctaagcctcaacgaaaagatcaatcaggaaatagtacgacatgcacgggacatagagaacattctgattagcttagattagctctgggcaaaagtgccaataacaagattcgaggctattggagactggcgaaactgggaaaccccgcactctgccactttgggaagttgtccgtgcgttgatgttagctttaacgttggccgacccatggttcggtcaatatcagacccagtcttttttgggggttctcgtgagttgaatcattcaatatttcctacttttcctacgttatcgctccagttgctcgtgaggacctcggtaaatgcataaatgcttacaacacaacacatacaccgcatgatatgtacgacaggccctaacgtgccaatcagcgggagctgatctcgccacatctcgtattccgcccgggtttttgcgcccgcccaagtcaatatcatggggcacttatcgtttcgagggttaggcattgatcataaaggttcttcctgggtctatccaatcccagctagatcgaggctccaaaccccgaaatgaggctgttgctgacgaaatagctgcatgctctgttggtcatggtcaatccacggagtagcgcttcgaggataagacggcctggagactccttgctttactttcctcttctttcttatgatatcccggcgagcttcattaagtcactgccagaaatagagaacaacacattaatatatgatttttttgctgctttatcccgaagttaccgttaccggaggcggataacatccaatgccagcaatcccaattgttacctccttcctagagcaagttctcgtgcatcgtgctactgcaccgccccctaacgtgacagtgtctgcaacttccgcatcactccaggtggtttgcgcctggccaatatcaggccaatatggaccggggacccgagtcctgtgggttttccgataatggtgttaccatgatatactaacatttactccagatactatgtcttgattgcagcctgcgtggtcgctcgcaaagtagaatggattcggaacgcttgtctagccgctgtgttgcttttccccgctatcgccgctcttcacgggattgtgcttgctgcacttcatgttgacggtgagtctaatgaaactttgccccgggtttcctcctggtgtgacccaatctgatactatataggcgctgtcgatatggatgtatatggagcattccagctatgcgcaattggaatcttaaccgccccagcgaccgtcaggctttcccggacctacttcaacaaccccggccgcaatatcatctttctatggacagtccttctcctggctgggctagtaagcttgattgtggaattcatgcgcctcaagcccactacttgcccggatgacgacccagcaagcattttctgggcctcaactgggggcaaaaagggcggtgtgtttaagtatgactctaactgtagccttgcttgtaccccggagaatgggccagtctcaccgttgcgacttgatgcagccaacaatatatacgtgattccagtcccccacgagctgacgttcaatgctactacgctaattgcggctgcatgctgcatccctgccatcctgtcgttaatatttatgtggatcaaaatcttggacgacaattgggagaagttctcaaatggaagacagaagcagaagccagatgatttcattctgggaaccaacggagctaccatcaaccacatgactgggatcaccgacaggataagcaaatggctatctctcatcgagataccggtgtttgctgcagcagtgctggcaatcctcgtcaaaggcgagatgaatttttggagtaagcaaatgaggtaccaaacagagcctatacaaagcattggtaagtggatgttgcacctcgcctggttttggcggttggaaataaacttactaaaagaaatcgttaggtcaatgggcgccaatcgttggtacagtactcgctgtattgggatcactatatatgctcctttctgcggatatggaagccgcgggacaagaagatgaccaacaagaagagattatcgttggaaaatccccaaactacgacagcactgtttcatacgccggaagcagttccgcgcaagattctagaacaattgccgagagacaggactcggatatcgaaatgacaactatacgccgccctactaccaatcaaaccaccaccactcaatcccagcacgacttaggaagacgaaaggtcgcccgcttctttaatgcagcaagcgccatcatgaccgccaaagcccacaatcaaatcaagaagacgggtttcaatcccgaagcaaaaacaaattaccccgagatcccaggagaaatatacagaaactcatatctccctgatcataaagcccattaccaaaggtcatctacacccgataaccgatcaagagctgaaagtttcacaagtcgcaggaactctgtggataatggcgaaggcagctctgggccccggagtacaacacgtcattctgtgcctgctccagctgtctcgcggccaagatcacgccaagctcactcaaattcgctcccgggtggggggttatttgagacatcgaccctgcagtgtcctccagccacacttggagggtggcagcgacaattgagtcccttcgatacaatgtcgatctcacgaagtagaacaccgtctatttccgaggtcagccccacaaattcatcgccgggacctcagttcctgccggagatagtagtttctgcccatgaaggtagttgattgttttgcatatggtgtactgatgctccggtactctaatggtgcgtggttatcttttctgttttattttcggaattctttatgatcccacgagttcattatgtctaggcttatacggtgtatattacagggtttcttcatacagcacattcatgataaagtgtcatcctctcatacctcaggcataatcacgtgataagcaatgtggtggagtggacccaccttcccctttaggaagtgtttgttcctatatatttcatagcaactccttcctcctaaccgacattccccccagtggctgagtgtgttgacacgcgtttaaaatgctaggttaggtactagctgtcagcgttcgacccacccagtgcacggtcataaatgttccaattacgctcccctaattggcccaccttgcttagtcgccggtcaggacctccagtaggtccggcaatgtgtgcgcaggtggggacgactagatcttagggtaaagatggttggggttacttaagcattatgatcccctaagtggcgacctgggagtataaccccaggcactggatgggaatgtcctttttttgccattttttcccctccttctacttttctctaaagtctgtctccaacaatttatgcctgcctttcctctcccccacaaagctcattgacgcttactacaggtatctatcatgagaacagagacaaggggaatacgcttggagggcaacattgtcaaaattagcgtcggtagttattactgtccagaattatatgtatcaactaccaaattatcagctataacccttcaaccctcaggctcctttctcccctcaagtctagcctgatgcgccatttttgagatcagagtcgccattccagcatgatggcagctggtgcgaggctccttttccggcaagatctcaccctcctgcccatcaagcttagagaagtccaaagactttggtttatcacagttatactgtgcattggcggcacgaagaaggcagatctcatttttcatgcagtcaccattgcagctctcaacttcgaatccgcgaacacgtctcgcccaataatcttggaaaaccgtgggatcgcgttccatcgcgacggtgacattgtgccagaaagctggactgatctcggcttgtggatccgtaagcggaggagagatcttggatccatagtctgccttcgcggagtaatagggcagccattctggctttgtctgaaaggacgggtcgctgatgttggcgatgtattgagtgtaatccaagacgccgaaagtgactggatcaatttcgtagacgcggaaagagggcgagccttccgttggcgttacggctggaatgatataacccattgcagtagctgtgttccagtctcggtcgttgtagtcggagtatgcgatctggaacccatcccggtgtgtatgaccatagaataatcccgcgatggtggcttcgtaacgctgcacaatttggtcgaagtaatccgaatggtcgcggaagtgatctggtataccggatggtatatgagagattagccatgcacgttggcccgcgtcctcggcagcctgcagttccttgatgagccattcaaattgtcctcgtgggtctttctccattggttcctggtacatatagaagttgaatacgtagtagaagatgctgttataagaaatgatgcgcagattgctgttgggatggacggctgagtacgacgcgaattgatccgcagatttgacagaagaaacacctgtgaggccataccaatcttctgcaagagccgagtacgcccatttgggatcagctttattcgaagcatccgtgggaaagaggttgagtggtgcagtgtcatgattccctattgcagcatacacagtgccaatgtccttttccattgcactgtacgtagcattgagcgctttcagagcttcggcctcgtcaaccaaccagatatcgcgggccaccacatcaccggtgtaaatggagaactccggattgatgtctgcgatagcagcatgcaagctctcctgaagtatttgtggtgcgtcacacttcgtatttccaaatggtccacatgggtaggctgtattctctggtgaatattcatccgaccaagatctgcaacagataggcttggaacacttgtagctagattcaggctcgtagaggaggtccacgtgtgtatcgctgaaatggacgaccttgagcggtgtcttgccgctaggtggtggcctcacagtctttggcttgggtgaagggaacgtcaaattataggaatgaacatcgggttgcttgcagagcccgaccagactagcgcatagtgtctttgaggcgtcagagttcagttgtaaatctttgaaaacatcatgcagcgcagggccttctttcttgatgatcccggcgcagacatctgggtcctcgacctgtgcacttgcgattaatgggattgagtcagtaagctcacgagcatggccaacataccctgctgattttgcacaaccctgtgaatacgtcgatcatgaaattctcaccaagccctgcggcaactttgatgctgccgaggagaatctgtataattgcatagagtcagcaaaggagtcaatagaatggaagtgctaaacataagcatacttggcaagcaccgcagtcaactgtattcttgaagtcgtcccagatagaagcgacggactggtcgacttgagtctcggcttgtacgccccggagagacgccgaaaggccgaacgccagcagcaagaagttgagtctcatcttgacgaggagttggctagacgaaacggctgattggatgaagacaaacctcgaaagcagtcagggcacttcgtaccttcccagcattgatgtgaaactcctaggcagtcggcatcttaaatatcacgggccaagagcagctgggcaggcccttccgtactttgccaaatagaaggtgatcctacagctgcttgcttagattttattcggttcagacataaccttaggacaactttttatcatgtgatgagcagtagagtagtattcatatcccctccaggtcataaaaatagaccacggtctttttgtggcctagtggtaatacgctgtattatttcgagaaacgcagccaaggagctagcagatagtcccttgtaacgttgcgaagccgctgatctcaggggctgattatcatacgccattggggtatccttggcatgttcgcatactcgtgaacttgctcctaaataggagtcgcggtgttcaaacgaaaatttagtaccaaaatatagatgaacaaccagaagcttatctaaatgtagatatgcacaccaagttcatacggtaaaatccgatcgaatgcaccagtccaaccattgtacacgtcaggctcagcacttgcaggattcttagtaaataaattcttgaaatcttatgggtaggaggattggttcgaacggatacttgcaggtgttgatctggggtagaaaatcaatatccgggctcgggtctgctgcttgggcgtattaggaaggagcttcaacttttggcctgatgcatcacactaataattggcgaatagacagatcgctgtcgatcgcaaatccccaacccgtctgtctcacaacagaacttcctctgctgaatcccccagcgcgcagcctcgcagactcggccagattcaataaaatgactgccacgtgtatttcaagaactttgtgactccggaatgtggaatggctcatgtgcaggaaccataaattgcttatataggcgcggaccagcacagcccctgacagaatactcgcgcaggtatccatgcgaaaaaaatcatagtatcgtgtcagtctcacgggactctcgaatgggttgagtaagatattgttggttggttggatttcgtcatggattggggtcagctcgctttggtctgttgtgccatgttcattggatgagccagccatatgtggggattttcattaagaaacaatccctggacaagaatagtatttgcatgctgtgtatctgtgtatttgtgtagcattatagcctcatagatgtaccttgaaaataaaaagggacaaggagagaagtccaaggtgattggcgggccaaagccggggtaaaaggatctaattttctctctccccacattctttttgacgtgttgaccatcttttccttcaacccccttttcctttctatctcaacatctgtccaagtattttaatctctgttgttctccttcttctccccccgtcctccatattccggattcggactccgtcgggaaacgagacgatgacgcctccgtacacgcgccatttcagcacgcttacgatcacgatcttacaataaaatccgagagcttcaaccgtctgcactgttctgcgctacgtgtgattgttaaaaccggactgtccgttggggcagtccgccatcggccaaattcgtcatggagggtcgtcaacaagccacgctgggtgtttcgatcacccttttctccatcgccagtctatttgtcgcccttcgcttcatttcgcgtatatttgtggtcagaaagattgggttacacgactggttgatgttggtcgcatgggtaggatccctaggcttgatccctgcatgtacccggggatgtagcgagaatgcgctctattgggcacatgatcgaacctcgtgctggagctcggaggctaaccagtctgcagttcatcgattttggcttttccttctcgctattctacgccgttcggaagggtcttggtctccattcgagtgacattaagcctgaagatgaactcgcttttaatacggctaattatgcatttacggtcctctatgtgagttacaatgccattgttacttcccctgttaccccgcaggccaatactgaaataaatggcatgctgacgatatttcagaatcctgcgctaatggcggtcaagacgtcgatcctcgtcttcttcctgaccttgacacgcaatcaaaaagtattccgatgtgcaaactatgtcactctatttgtagtgaacgcagcgggctttgctttaacattggtcaatgtttttcaatgtcgtcctctcagcgcagtattcctttctgacatcccggcccatgcgagttgcaccgatattgtcaccctgtacctttcctcgtccccggtgaatattattacggatctcgcgatcctgttgcttccgatgccgcttttgacaacaatgcgcctaccttacaagcaaaagattattttggtggtcactttctcctttggtttctttgtggccgtggtcgatgtggttcgaattgcctttctccaacaggctgccatttctcgttcgctggaagtcaagtcaattcatatccaaaacatcgggggggttgatttcagttgtacgactcgctcatctccgtattccaaattaacgcgtcaattgggctaacgatgggatttcacagggtacgcgtcgctatctttcatgtggtctgtcgtcgaagtcaacatctcgataatctgcggttgtgtcccgagtctcaaacctctggtcactcgtcttgttccgaaattgattagagacactggtgacgagacatcaactgcttcgcctcatggactctctgcaggcccgacaggagaaagtcaggttgcagtgccacccccggctgcagtctcgggttcgccagaatttcaattgccattgccatttccatcgaataacaacggggataagggtctacggaaccaagttggtggtgtctccactgggcgacctagctcccgggactcggagcctatgggtataatggatttcctaggtatcccagaaacaggggccctcgatacagagggaggcaccaacacgagcgcatcttatgcaccggatatcacattcttcgattttgtcaacatgaagaatccggaaagtatgctaaagctgaacaacagagagtcgattacgccaattgcattgaccacactactattcttcctttggggtttcgcatacggcttgcttgatattctgaattctcaattcgagactatcgtcaatttaggtccttggcattccttgggtcttcatggcgcgtacttcggcggatacgtggttggccctctattggttggccgaccggtcttgaaaatatggggcttcaagtccacgttcatcactggactttgcatctatgcctgtggaaccctcatattttggccttccgctgttctgacgtcgacacctgcgttcattttgtcaaacttcattgtcgggtttggactagcagttttggagactgcggcaaacccgttcattgcgctatgcggaccactcgagaattccgagatcagactcaacatttcgcagggtgtgcaagctattggaagcgtattatcgccgctcctagcgaaacgtgttctcttcaagaatgttcaggatgtcgcatccttggttgacgtacaatgggcatatcttggcattgctctgttcgatgtgctgctggcagtggcgttctattatctaccaatccccgaagcgtcagatgaagatttggaagaactagcaaatcgacgccgagaagacaatatgaccaaagtcatcggtattccggtcgtttggctgaccctcggcctgggagtctggtctcaattcttctacgtggctggacaagaagtcgttgcgacagctctccaacgttttgttcttgccgctcgtccagattcatcactcaaaccattcgatttcctgactattggacacagcattttcgccgtgggccgcttcttcgccgcgtttgcgcaatggttcctcaaaccacgctggattcttatggtcagctacatcggcatgatcgtctgctcaattctttgcatgaaaacaagtggcacgggggcaatcgtcatggtaatgctagtctacctattcgagagcggtgcattcagcattatctttgccatttccctccgcggcacagcccagcatacgaaaacagccgcagtcttcatgacagcggcaattggcggcggcacctttttcccgtttgccgagtacgcggcatacctcgcacacggcgggtcatactccttctgcgttatagtcgcgctcttctgcgccggtgccatcttccccatctacctcaacctcgtacccgccgtgaaaaagcaagtcgacccggttccgaacgagtatctccgccgacatcgccgccgacctcggacctcgatcgagaccgtgcatcgcgaaaagagcaatccttctcttggtggtgttctttcccatccgcgcagtctggcatcgaatccagaccacctaccggatcttctgcttccggaggagatgcacgaaaactcgcttgctcgcgatttttcaggggctaaatctagttttagctctacctcgcgtgccaagtcgaattcctctcgcaattctggttcaaagaaaaagttctctaccagaattgatgatttatgactgtcgctcaatatgcctaactgctgtttttgtctctttccttataccctaaacttcacgatacttgcgaacccctagataccctttcgcttttgctttttgggttttgtcacaatattatgtcatgtgtcttctctgtgcatatattgggcggcaatcctttttgctttttcgcagcatttcagcgatggtgttttgaccaaaagttattccttctctcttagcttatctggtttcattgcttaatgatattcgaagaatctcatgatcaaacttgacttctggctgggatcaattgcatatacctaatttggatctgattggttctcgaccatgagggttctcgtatggcccaccctatcaagatgtcgtgacccttgccaatcacccgcgggcaattgcagctcaggcagcactacctaccaagtctcgttccagccccttttgcaacctcattttagctttcgcctcaagtcggttcggggttgacccatctacggattttagatgtagtccacaaccttcgaattaaagaaatatttacaagtcgatacattctatatatttacacgtagcatcttaagctgcacgtagccgggcgtgttaaccaaaaaagggctgttttgggaacttgctcattaagcactagcatgaaaataggtagttctagatttattggctatgtactatatgaatctcctcgtacccataatgacatatatcattcttcaaccgagcgcagattccgtttagatgcaaagcagctgatacattgtttgctattcctatgcagcttggcagacggcaatctctttatccgccctgcagaaacgcggctcggcaaatctctctttgctcatcttgcggaagatgcttctctagaggatgtctatgtgtctttgtccacgaagctacatagagagctttatggcaatagctagatcatcattttccatccacttcatatcgtcatcattctggttgactattttgcttctcgtggtctttacctccatcgtcatcatatctgtgtgatgatctagctactgtcacaaagctctctatatagctctatgctataaaccaccaaattccatcctccagaaaccagaagaagcacctctatggcatttctttcacttgcggttgatcacttcttctctcgtagtctgcgccttgatcagattcccaatcctttctatgtaattttgcgtgggtcaagggtttatcttggagagtgcctttttagacggtttcatggtcaaaatatgtacctcactagtaattttaggtagtctgacaatgatgatttactgaaggtagcccatgaatgctactcacactgtcttctttggatcgccacagatctccaaatcgcgaactaggtcgagggtggaaataccagaggaatgtcaatcccggcattccccatactatttccctccttccctaacaattatttaattccccaacaaagaacaaggccaggctagaatacaggatagtacactcaaactgaaaccatgaccaaaaatcagagcctccgatgcaacaccgaaaaaggtgtgatctcggagatttaccttttgatagaagccagtcagattggattccggcggtggcaaggctagtggagcaagcgtcgaactaaaaagcctataagaaggttaaaagcctaggcacgccccagtctcagctacgccacgagatagttcacaaagcctcatctattagagctaataaagcgatgtgcctggagtaactacaatataagtaaatttctcgataaagtttcggagtagattaagttatgcttgcgatgctctatagatatcacgatcggttcttatatagtcagtccctaccgccgttaagattaggcctacgattaggcgtaagagctaatctggtccaaaactcaaagatgctctgaaagatacatgtaacaatcaagacacggacttattgcccgattcttccatgatattcagatcgagcgaaaaaaaagtcgcccccctcaaacgcgcacagccatccaacgggcagccaccagcggttgccgttcggattggatctggagagtccacagcggaacaagcgcaaaccagtggggttgcgagattcagcgatttttgaaacggcgattctgttcgtttggtacgattcccgacggggtttcttttttttttttggctgcactgggattggttgatttatacagaccgaaatgtagcctattctctattatactaaaccggacaggtgggatcggctttaagtttgaattccttttttttttctccacgtcgaaggcgcaatcgccccaatgtctggctctctgtatctcaactccgggatcattccggagcctcgggtgacttccgttgttctacagaccttgttggagagtgttgattctagttttcatatggattatatgtatagatgaattacgtatatatccatctacctatgcgatctagtaaaaccgaataggacaaagaaagctcccccccaatgatgaaactcgtaacacaagtcgcccgttactaaatgcgtattttgcgcagaagccagcacccatatcctaatgtacaggaacccgtattaataagaagaacccgctggacagaacaaatgaaataaacaagaaacaagatcgctagagatgaaaaaccaggagccagacagggctctggtggacgccaagtcgctgacccaatgtaaaaagacaagagtcgaaacaagaacagtcaacagtgctcgatgaacctcagctgcgcgcactccgcggcagtgagttctgcgaggacgagtcgtgcatgatatccggcgcccggggaccaaccatccagtcttccatagcgagccattcactccagctgcgctcggcggcctcgatctcggcgtccagggccccctgcaacggacgcaggaacggtatggtctccagcggggggatgtcgtagtcctttttcacggaggcccagccgccgctcttggctgcgaagaggtagttgcggcgctcttgctcgtgcatgggtcccacgccgctgccccagtcgtcgccgaagaagccgtgcagcacgccggggaagtccatgccggttgcgactaggcggcggatgtaagggatcaatgagatggggggtggccctgagggttgtgtgccgggtggggagggttggttggaaggggtcgaggttgagttgaagattgggtgaggttggcgctggaaggggagtcggatgtttaagaatgtggagagggcctggacgggggcgctgtgctgggcgtgatctaggaagtagcgttgacagctttgatagcggggataccattcaaagatatcggagttgtcgtctgaccctggcgaggcgtcggctaaaccaatcacaggggccgggtcaatttgtggatgggagctcatagatgggtgtggtgaaggtgagtccgaataggatgttgaggtcgaggtcgaggttgcagttggagctggagttgcagtttgtagtcctggaggatctacttgtctattccttttcccgatgctttgcttagttcgtgttctctctcttcttggtctgtttggggctgcgcctctttcccgaggtctgggaatccagtggggtcgaattgcggccccaagttgaaggaaccggaggggtaggtgggtgaaagatagattggggaatgattacttggaaaaaatatccctacctcgacgaactaggagagagactcgacgtcgtgaaggggaggttggggagggcggtgcagagcggaacagatccctgatggtcccgagtccgccacgagattggggcttgttgatggacatctgttagggaaccatctaggatgttcaggtgaggattgggggatgttcacggaatacccattggggatattatgtatgaagcaaaagaaccggagacatacatgtgaattccaatacctcaagaggcagagggagggaagtagaagaggaaccagacgggagaactgaagtaaattcagagagaaaaaaagatatcagaattgttctggaacgtccatagaagagaaacggggtctgtaggactaataagagacgcactcaacctctatacggagtatttctgaatcggatccatcgaggacgggtctatccggtcaggccaatcattctgagatctgcttaaccacgggtcgacggtggatatcgatctagggcaggttttgggaatttttatttgatatattaatatattacgcttatattacacctttaccacatacattcccgatacggaaggctctcaatcctggataactccctattttgtcacagatatcaattactttgcacgtctggcacgtcctattggcccggatccgggcatgctaataatacctgttcctataaaaggcgtccgggtacatgacatagctgcatcgaagcgtaactagatcaggctggatcagaaagggaaaaaaagggggccccttcaagaccgggacctcctggtatgtgctcaaccaatctcaacccgggctggtactcgctgcaaggcgcctagtcatgattgaaataatattagaccagagaacgcctgcctattccatgtcagcattgcctcagtattaagtggacgactagtcagagcatagcgttaaatagattgaaccctgcagggtagttcgtttcggtatcacttgacgcaataattgaatcaagaatcacactaagagtgacgttttgatagtgggtttcatatctaaatcaaacacagggagttgatctgtataccatgtacccctcctccctgccaagttcccacaaaccgggttcttcaacatcgcatgcagcacgcaagacccggaatccactttgttgttatcgaccccgatcttcgatccgggaacattccttattctgattgtatgcattgcaaggctacggagtacttcttccacctcaatccccatttgttcaggggccgcaatatgacacaagcttgcaaagtcagccccatattggcgtcactagagcacacgcgctaggatctacttaaaaaagggccagaacataggagagcaggggccactcatcgagctgtgagagtcagatccccctttagcggggaggtcaagctctgacccgatcgcgcctcccagataagaaatgacagagctgatctttaggggggttgaccatcccgtacggaatacggagcactccgtatggagtacggcgacctgctttatattgtctactgattaagaattcaaatcgcagtttgtgtgcgggcgagtttttgtaactccttttctggagtcgatatgggtcccttcagctgcacaaaatctggtggcgccgggccaggggttaagtaaagggcggaactatgtgcgtcgcattccccttttgcgctttctttttcgagattatactgtcggctatttcgattgggtcgagtttaatgtattcatcactgaccaattctaatattgtgaattctagccatccgatcaatctattctcactcacttccccgtggaattcgccacatgcggagctccaatctgatccactcgtttgccatttgacaggtgacggggcgattctttacaatatatgacatgtgtctctattgagctaggactgcagttcgagtcagccagtcggaatcacgaactggcaagaagtgtgatcacaaatcacagcctgagatgctcttgccaattcgatcatagtgcgcacgctgcacggtctcgccgatgtttatgcgaatatgcgaagaccacaatattctccaagacggtagtttggtatacccgctagtgatgacaacctattgccattcttgcggagcggagccaacccagaacagtgacacaactcggccgacgccattgagctgctagaggctatagcctgtctcaactcaagcgcgacgacaactagtacgcacgcagtatccacgctcagttccgcggatacccctgtaaaggttgcggagcgggtagatagattaaggggaatctcaagctgctgcccaatcaccacactaccataccctatgccaatggtataaagcatttgaaacaagccggtctgcatggatatgtgtcgttccaagacagagacagcatggtcgcatgaccaagccctctgcactgcagctagtgggtattcggataaagctccgcagcgagttggcgaccgggcttcgttgccaagagtgtacgagtactccatacagacagggttcccgccgaccgccctatgtactcgttatgtcagaagcgtcgaattatgccggtggtaagtaggtgtcacaacatcgcaacttgccacgcgcgatcagtgcatccttcgcacatgtgtcgtggcgaagaacatgtaccacaccaatcccaagatgggagaaaacggtgaacgttggacttgcaccccttcgcgacaagatcgccggcgtttatatatccatgcagggtcgaaaacggtatatcaacccacacccggcagccgacacgtgtcaccgcacatctctagcagatcaacatccccgacacgaataggaaaaacaatacttaaccagcaaacagcgcgaagatcatcgcattatctgatccatctcctctagttacctggccatccatgtccacttcgtacatgacatgacatgccgtgtaactcgtatccctctacgactttgcaatgctgcaagtgagcgatgaggatttctatagaccgtaactcaagttcttctaagttcgtgctagacatggataaccccaagccctccacaaacagggcttcgtaaatcctcgcttcaaaactccgtactccgtactccgctactttctttgtatgtaccccgcgaatagcgcgacagtggcgatctctaacccactcggccggcagaaacgaacgcagggccccagctgacgatctcgggtaaaccgtgtgtcatgggcgcacggtgtctccgatagggaaatattggacgaatgggaaatttgctactgtcatggactcgtgctggtgtgcgggatcgcttgttgcggagaacgccgttttcctggtctgggctagtctgggctgatctggggaaatgaaatgcatagttgatactcgtatactatccatagataacgtagatgtgcatatttttgaatggagtaggtgtgttgatgatgactgggatgggtctgatgggcttggatatcgtggtgtcgatgagttaagttagtgtcatgttagcgtggaagtgaggctcgtgttatttccacgtggcttggttgaaacgctgatgggtctgtactccgtatatagatcggtgttgaagcgctaggttggactatctttatacacactgtcccataaatatgtggttgttaactaaacccatgggtgaatttccggagatatatcctatggttattgtctgtttgaacggtaaatatatggtggaccatgctttggggtgtgcattgaccagatgaattcagccctggagattaatcatgttcatagcggagaatactttacgttgtacggagtatgtacatcattgaatagatattcaatatcagtcaagacaactttggaagcacagattcccattcgtcagatatcacgtcatggcaagtccggagcacaaggacgtccaattatagaatatttatgtcaaaaatccaagaatctctacaatagcaagcggcataagtgaaacatggagacgctagacaagctaagagatctacccgacgaactaaatgacccaacggtctccacgttgcaaccctctgcaagcacgttgtcgaacccacaagatccaacatccgaatctgcaagataagaacgcatatgcagacgctaagtaacgggaacagtccacagtcaaccctaagactagagagctctaacggagataagcttctggatctgcaacggaaatccactgggtcctgagggtcccaaggttgtcccacgggccacatgtggtcatgtgcgagtatgaattggaggtcgaccgaggcgaactctcgtgcgagtacggagtagttatagatcagatcaaaccacagggacctcgggagtaaaaaagacggagcatcccgtgtgagtgattctacatttggcttctcggtgaggattcctgtcgcaaccccaggaagcaacacgcagcctccgcaaatcgctatcaacaaggagtggagaggcgcgtctgagttttggcggagagctgtagcgggcacccgttcgattggtggaccgtggcatgatctaggatctagcaatgtgtaaaggatcaggatgttggcatttgtttcttcctttctatttattttatatttatttgcatcgtatgatcgttatcctcgtactctgtagaggcagtcgaatcctgcaatatatttccttaagattaggataatctagagctgatattaaaggtactccgaagtacgtccacggcagcgccgaccatcggggctccaatgcggttaaccgggtcttggcatcacacgggattggtgcctgacccacgggggaaaggacaaaccctggacagtccgagatgactattcgggggcgattgactggaccgggatttggtgcgggtattcgatattccatggatttggctactctgtgtatgtatgaatatgagcattctatatgttgtagcaacttttttgatctcattccgactagatttaggtctggaattacccctccacccctccatccctctacccctctacccctcagttcaactgatccagtggggcaaaggacgagccgtagggtgtagataaaggaaaaatgagtaaaaagtgttagaaagcaaagacgatcagataagctcggtaagctaaaagtggcaggccccgttttggggggccgctttgggtatagtggacacgtgacccagcctgcagccgagtgaaattgccgagttgagtggcggagacgagttttatttttttatttcttttattttacttttatttacttcattttcgattcaatccatagccatagggatattcatatgaggatagctcgaagatagctcgaagatactatgttggacttcctagtaactacgaaatgcacagtccacgcatgcattagaggttcagcctcctcacaaggttacattcacttcaattatattttttcacctctcggatcggtcctctccgagaatacggatcgcggaagagatattcacagacaaggaagatttaggaagaaaccacgggctatgattgatgggaagattcgaggtagtccaatgtgggcaagataagccaaattctgtgcaaattctgtgaccttaaaccataagataacattgttcgggccccgaacttcggacgtgcttcccacggaaaccactggaaaccattgggtttcatctttcgcttgggatcttctccttccaattcgtgcaacctggtcttctggcatggtcgtcgactgtaggctcatcgaccaactcccgtcccttttccccccatcgtccggaatctgtcgtccgactccggcttggagtctggctctccacatttctatatatttgtacaatcatccccttccctccttcttcctccatctactctccaaaatctcgattgtcttatactctgctcgtgggcaatttctaatatcataatcacatcagatcactgcctagcattgatctaccctacctaaaagcagagtaaccgagactaaaaacccgccgaaatgatccagaacctccccttcgagcctgagttcgagcaggcctacaagggtatgtctcttccctttcccttgtccacgccaatgccatatcacaatttttgcccggcttaattcctttaccgtcggcatcttcccggcgtgcggctccacaatttcggggtgactcagctaacattcccgaaacagagctcgcctccaccctcgagaactccactcttttcgagaagaagcccgagtaccgcaaggctctccaggtcgtctccgtccccgagcgcattatccagttccgcgttgtctgggaggatgatcaaggccaggtaagattcttgtcaaaagatattcgatcaattgccacattctaaccccccctccttcaggtccaaatcaaccgcggataccgtgtccagttcaactccgctctcggtccctacaagggtggcctccgcttccaccccaccgtgaacctttccatcctcaagttcctcggtttcgagcagatcttcaagaatgccctgaccggcctgaacatgggtggtggcaagggtggatccgacttcgaccccaagggcaagagcgacagcgagatccgccgcttctgtgtctccttcatgaccgagctgtgcaagcacatcggtgccgacaccgacgttcccgccggtgatatcggtgtcaccggccgcgaggttggcttcatgttcggccagtacaagaagatccgcaaccagtgggagggtgttctcaccggcaagggcggcagctggggtggttccctcatccgtcccgaggctaccggctacggtctcgtctactacgtcgaccacatgatcaagtacgcctccggtggtaaggagtccttcgccggcaagcgcgttgccgtctccggctccggaaacgtcgcccagtacgccgccctcaaggtcatcgagctcggcggttccgtcgtctccctctccgactcccagggtgccctcatcctcaacggtgaggagggctccttcaccgtcgaggagatcaacgccattgccgccatcaaggtcgagcgcaagcagatctccgagctcgccaccgtggccaccttcagctccaagttcaagtacattcccggtgcccgtccctggaccaacatcaccggccgcattgatgtcgctctcccctccgccacccagaacgaggtctccggcgacgaggccaaggctctcatcgccgctggctgcaagttcatcgccgagggctccaacatgggctccacccaggatgccatcgatgtcttcgaggcccaccgcactgccaaccccggcgctgctgccatctggtacgctcccggtaaggccgccaacgccggtggtgtcgccgtgtctggtctcgagatggcccagaactccgcccgcgtcaactggtcccgcgaggaggtcgactcccgtcttcagaagatcatggaggattgcttcaacaacggccttgctactgctaaggagtatgtcacccccaccgagggcgtgcttccttccctcgtggctggctccaacattgctggtttcaccaaggttgctgaggccatgaaggagcacggtgactggtggtagatcagtcgccctcccgtttattctgggcggtgttctgtgatgatttctgtcctctcttgaggagaggcagcttcgatgcattttattcttttctttcaaaatagctttttaccctttatgtcaagcgggttatggatagaggcgcttggtttttcccctgttgcatttgattgatatccccacttgagcaccgctgtttgttttggttctgcacttgggattgtcatgatgataacgagattcaatgaatgattcaaaaatacctgtgccctgtaaactgtagatcaaagtagagccctacggttgcatgaaactttcaatccttcaatcccatgaaaccctagagaaatctatagatccaaatcaggtgttaatctgtcatgtccaacgcttaggccccgaccagtgctgcagcacttgccannnnnnnnnnnnnnnnnnnnnnnnnnnnnnnnnnnnnnnnnnnnnnnnnnnnnnnnnnnnnnnnnnnnnnnnnnnnnnnnnnnnnnnnnnnnnnnnnnnnnnnnnnnnnnnnnnnnnnnnnnnnnnnnnnnnnnnnnnnnnnnnnnnnnnnnnnnnnnnnnnnnnnnnnnnnnnnnnnnnnnnnnnnnnnnnnnnnnnnnnnnnnnnnnnnnnnnnnnnnnnnnnnnnnnnnnnggccctaccaatgctgtctcagaacatgtggctatcaaaatgtggcttgcacccacaagatacaagtcacgtgatgatggatatgctttgtcacgcggtgattacgtaataccttcacgagcctcggagccccgaccaaagaaagagctatccctcccagcctcaaaacccgtgacctattcctctaaagaaaaatgactagcgcgagtctgtaacttgcaattcctatttctacaacatccgcggcgcagtgttatgttgtggagatgacaatgctgtcggacagggcaatccccgaacaatggaggaccttcctccaccaatgtttggcgaaccgtatagatatagacgagttcacggacttgtccgggctgatgtttgcccgcgcaccggttaaggaaaacgagctccttgatctgctccttgaagctcgcgcttcttccagtgttacctgggaccctcttttgccattgtacgtcgatggactgtgcaagattgggagggttaggtcttcgtctgcgctgacgagtttgctgaagcattcttctgttatggatgcgttggggactggtgatggcgatggtgaggagggacagggacacggctctccgtccaaggctaagaagcacaaaccgtccacgctcatgactgatatcaaagtcattcaggatgtcatggtgttcatatccaccgggtcaatcccgaaaactgtcatcgaagctgcggatatatactcggctaccgtagactggattctggccgtcgtggcgtggcacaatcacagctctgactctgagcacgcgacgggtggcttgatggggtcgcctgatgcggtctcgttgtttgagtcgctggggattctgcttgccgctctgtcggggactggtaaagggctggaggtgttgtccagtgattacaatcaaggtatgtatatgtggtttccgtgtttgttacacgttattaacgatatcctctagaattgaaggcgaagctaggacaggctttgtcaagctacttgcctctctgtatcgatgtctctctgccgctgaggcatcgtttggaggggttgcagaaagtgtttcatctttaccccggtcaaccttctaaggctttgggtgggcctgctattgacggtgttaatgtcaatgccctccagtttgagtcttccgtcatggatggccccgttattaacactagagctgggctctatgtgtacatcaactcgatggtacgattatcttacgctacgatgttggttcatggctgactagtaacaggtcgtgggacgtcctttggtcgatgacactattctgatcaactacctcaccaatcgataccaggtaagtccaattgacacgatttctagtcagagttgtttacaacatttgattaacccttaccagggccacaatgacgttctcatcgaggaaatcatcacagccgcctttgatgttctctccaacggcgtgtatcgtaacgaatctggccgcacgatgctcttattccggtctttccttgtcaacaagctccccgccttttttgcagccatctcggcagcatccatggtgccgatctccatggaaatgtgtatcagccacgccttaagccgtctggatccgaacgcattcccctccttctctcagatgttctccatgcagggcagcagtgttttatcagatgctcgccaggagttcctcttcgcttgtgcgtcgcacaagctcatacgagaatccagcattgaacagcttctcggagaaaatcccatgcagacactgcctggtggcggcccttatgtcaaggatgatctcgtttcgcaaatcaataacaatcatgaacgtgctgagcaacttattggtgagatcgagtcgatggagggtaatgcaggcgcgatagttggcgctgtggtcgatgtatgttcgatccgatatcaattcctgggagtatcaacatgctaacttcttcaaggtcatgcaaaatttgtgtcatcaaaaagagacaatgacgctcaagaatatctgcaattcgctctcacgccgcccgcagactttggacgtcatgttgcttttccgcactacaaagcaagtattgcaacctctttgcgctgtccttgattcctggaagtgggacgaggaccaaggcgaaaatcagcctgtctatgatgaatttggcagtatcttgttgctcgttcttgcgttcaaataccgatatgatctgagccctactgatatgggtatctcgaacaatgactcgttcttgttgaaactcttggaccggggcgcttgcagccagaagctgagcgacttgagcgagaagcaaaacaaagatctcggcgcttggatcggagctctgttcattgccgagggcatcagtgaagagaccatgtcctcttgcagcccacacgaattctacatgcttgtgacgacattgttcgatcagagtcttggggcgtgcgagtccggaaagctagatttcgacactctgaaaggcggatttgaatgtaagaaaatcttcacgcgatcgcttccactggatacttagctaaccgccataaagatctgctcgagcccttcctcctcccgtccctagtcgtcgcattgacatggctgggcaatcacatctgggaatcagagaccgaccccacaatccccatcaaaaccctccactccctcgttaaacccaactcaatctccggcgaagcccaagctatccaccaaacagtcctgaacataaccggctgtccactagaagagcaactaaaaaatgtccgaacgagaaaccagtcgcggacagacatcaaaccaatcctcgatgccctggagccatacatctccttccgccgcgtcggcagctgtcgccgctccgaacttgacacctggacgtcccactccgcgggcgggctaatagccagcatccgcacaactttacaagctctcgtcctctggagcgccaacccaggaatcagcatggccccacacgcatacacgcaccggcaggtgctagcagggattcgtatgctgggcgcaacacgtgtgctaggcgcgataatcgacgaagtcaagcagcagagcgaagcaggtaacggacatatcgcgctagacattgcgacgacgatggtgtgcgctccgatgacggagtccttcgccgtcgaccaaaacaactaccacccagtcgacccaagcaaggaggctttaccacggtgcgcgatcctgacgctgcgcgacgccttgtcactacagcacgagaacgtgcccaagatctccgagagtgatccgctacgcgccgaggtcgtggtgcgacttgcgcgacgggttaatatgctcatggcgccgccgtcgcaggtctcgaacatcgacgtctcgaatattattcagaatatgcatcttggtgttgaggggcatgaggatcggatggatcttgagccttccgctgctggtgtttcgggtgatacggtcaatgaggatgatccggataatatcaatcagatgctggataaggcggcggcggatgcggcggctgctgggatggatgggggtggtattggtgtaggtcaggatatgggacttgatcatggggctggcatggatgctattgacgatgtgcttaatgcggcggatatggcggttggcaatcctgagttccttgacttggatatggaagacatgttttagtcgggatggttttatctttggtacataatctatggacttacaatgtccaatctttgcatggcattttgttcgatctatgttttggcgaatgatgattcattggacaacgaaaaataacaattatatcttcttaccggaagaaacagaagaagagaaataaaactcgtattgaccatcaaaaactatcaacagagcactagggaaaagaagaagaggacctcaggaccaaagtacccaactacggccctatcagactgagtcacatgactatggatttccctgcaggactaattctctccaccaatcaccatctctcctagaagaccccagtcttgttctttttttggcagtttttcaattccttcattttgaacacctctgaaatattagaaatggatataagatggaaccagcgtaaggaacatcatgccagactcgctgcacaacccacaagagaaaaaaaaataaacaaaataaaacaccatcaaccccatcgccccataactagcaattcgatcctatactccgcacccaataataatacaccatctagctgcgcctcgatacatcgtcgacataggacctatgactcactcaatcctagaaaccggagtatgtctcagtagccgacgtcgtagttaccacgatgcaaaagcaaaagccatgtacgtacaaatattgaaagtcttctcaactttcccggccagctggggaatccccgagccagggaaaagtttctccacagcttgcatgggggtcgggaggaggcctcgtcggttattatttctaataggattgagtgggactgggcctgctgctgccagagccgagatggagatggtggcgaatattgtagtgagtttcatgttgagctgtcttcttgaattgctgtggaactgaggtggaattgctggtcgttgactccaaggtggaaatatatatatcctgtgtgttagtggtcaagtctacgtaactagtcaatatgctgttgtaggtaataacaaggtatctgtctaaagggtcacttactatttcctgactaggtgactgtagtagtagtggagtgcttgatactcttggattggattagcagaagagagagtacccctttccaatgaccaataatgcctggcacggccttcttatctacatccccgagtttcgtgctttgtgcctgataggccttcttatctgccatcctgggtctggggctaggaccctcatgtcggggaacttcaggcatgggtctagctcattccgatggcttgaaggcactcatgggaagaaggttttccttcggcgtggggaatttgagggaatgtacgcgacggacgtgtctagacttacggatggtgttgagggttgtacagggttgtacatttgatccgctacttgacatctgcagggttgttgcaattatcagattgatacacgcaattattgaatgaagatcgcgcaattactgtatgagacatattctgatcatgctagaatgcacctcttatctccatgcataagattagttacacccctgtcaaagattctttagtgagatgctgttcagtcaagggatacaatccagcccttgaatacacatcgctactagaagttagttccttttctgaccatagggaagctgaatgaacagattgtgaacattcgttgctgtcgtcttgaggatatttatatgtaaataagtatgggcccaagtgaatacatctgagtctgactttcgataattcttccaccccacctgccacaacccacctgagccaagagcagcctgttgatccagtgctccgtatggctccggtactccgtacaatgtgagactagctctcaaggtagccccgtcgtccgaccccgctgctcattgaataatctgatctttagtgctcatctttgtacggagtactccgtacggggaagaagtacttctacactggaagcgctgtcgtgtccaagctcacagtctttgggagtagattgtatattggatggcactcaggagcatgtctttgatgtggttgagacccccagcagccccaaggcatgcatgacgtgatattcccggaagaatatataagaatacccggtttaataccgatgcgtcaattaatctgcctagcaagaacaaattcccccccttactacgggcctcgttaattcaccattcttcccatacaaaagtcgtcataacggagccgagccagttccggccaatggaagtgacttgccgatcaatctccacttgttcaagcacggatcacctttcaaaatgtcggtctccgagagtagcggcgagtcctgctatttcccagagtggaaattactcatttggaactttggtggggatacaagagactgctgtaggtaaacaaggtataggcaaaaagcagagcactattagaacgcttcttgcggtgtaaattcgtatataaaccaactacatttatacatgatgtgtggggggcctggacctacgaacccctggaagtaaaaatcatttcactgcgtatcaattgattcgttagagtttggtctagaggtggggggttacatagacgcggccagtgctaataactgaacgaaatgtcagaaccgttggacctcttcattcaacacgcaagatgttgcgcagacccgcaaaacggatctagacaggcagtcgcaaattgcctctttgggaacgagggcgcatattgcctgattgggaacacggaccgggctagaatccgattagataagacccgggtagatcgggatcgtcagggaacccggttatcgggacgtatcaccctgcggaatcgtcacgctttccgcgtctcggcattgttgattatttcatactaggcataactggctttggcagttcgtttgagggggaactttggtttcgccaaggcgcctcaatctagaactttaaatttttatccggaagacatataaacatatatccgcttatagctcgttcaatcgccacggatgacgaacatcgcgtagaggtttcgaagccactcatacaaagtattgcccggcaatttcagctggtagtgatccaccatgaaacgagaagtgggaacaatcgccaaaacatgcaccatactttgtactgtgatctgcatcaatcaaatagtagccctagaagccctaaaagcctcatggatccagacaggtactccatagaagtcggaggaatcggacctttccggcttccaatgcttatctgttgaggcattattggttagacctggaatacaactagttcactggacccaagatttgcccaaaagtgggttcccttatggaactcggcctttgtgccgcgctttccaggttactttggatctattcataggagtaaaacaacatctttcacattagcagcaatactgaacgaaataatggtaacaaatcgtctcagccaatcgcaggccactgctcaatatcgcccttccgatctcctattccctcggtctggagtcggcacatataataactcgccccctttgcagaagattctaagataaatatgctagtcctcccaatttaattacttctgctcttataataattttttgttccctgaccaatctccactctttcaaagtctcccatcatggagcagcatcccgatgatgcgtcgctgcacagcggatatcacaatgacgaagacgagaagaaccatacgcccgtccacaagctcaacactcacgatttcaccagcgtggagaccctccacggaccccagcccaaccttcacgaatcaaagagtaccgagactctgaacgtcgacaatgaggatgactctccaccccccaagaagaaggcggcggattggcacatgacatcccatgtgatccgaaacgcagaacgggatgaagcagctggcttcaagaagcgcgagctgggtgttacatggcagaacctaaccgtcgatgttcttgccgccgaagccgccgtcaacgaaaacatgatctcgcaattcaacgttcctcaattgatcaaggattggcgccgaaagcccccgctcaagtcgattgtgtcagagagtcatggatgcgtcaagcccggagaaatgcttcttgtgctcggccgtccgggctcaggatgtaccacgctgctcaagttgctcacgaatcaacgcgaaggtttccactccatcacgggtgacgtgcgtttcggaagcatgactcccaaggaagcttccgcctatcatggccagattatcatgaactcagaagaagagctgttctacccccgcttgacagtcggtcagactatggactttgcggctagacttaaggttcctttccatcttcccgaaggagtcagtgtcgatgagtacacagccgagacgaaagcattccttctggagtctatgggaatttctcacaccgccggtactaaggttggaaatgagttcgtccgtggtgtctccggtggtgagcggaagcgtgtttctatcatcgagtgtctcgcgaccaggggttctatctactcctgggataacagtacccgtggtctggatgccagtactgcattggagtgggcaaaggcccttcgtgctatgactgatgttcttggccttaccaccattgtgaccctctaccaagcaggaaatggaatttacgatctcttcgacaaggtccttgtccttgacgaaggacttcagatctactatggtcctgcaactgaagccagacctttcatggaaaagcttggcttcatccacaccgagggagcaaacgtcggtaagtgtttcctgcatctgtcaaaaccccgacaccaactaacacaacgataggtgacttcctcactggtttgacagtcccgacagagcggagagtccgacccgaatgcgaacgcacattccccagaactgccgatgccattatggctgaatacaaaaagtccagcatctacactcgtgagattgcaacatacgactaccccgactccgaaatctgccgcgagcgcacagaggcattcaaggagtccgttgcgtgggaaaggtctaaccacctgcccaagggtagtagtctgactatcagtttctgggctcagctcattgcatgcaccaagcgacagtaccagattctgtggggtgatatgtcaacattcatcatcaaacaagtttgttcatgtatcatggccttgatcgctggttcttgtttctatgactcgcccgacaactcattgggtctcttcacgaagggtggtgctgtcttcttctcgctgttgtacaattgtatcgttgccatgtctgaggtgactgaatctttcaagggtcgtccggttttgctcaaacacaaggcctttgctatgtaccacccggctgcattttccttggctcaaatcatggcggatttcccggttctgttgttccagtgcactatcttctcggtcgtcatctactggatgtctggcctgaaacacactgcggctgctttcttcaccttctggattattctgttctcgacaactctggtaagtcgtcgtttctcattcgatttctttgaactaagactaactatgactttttcagtgtattacggctgtcttcagattcattggatccgctttcagtaccttcgaagccgcgtctaagatctcaggaactgcagtcaagggtattgtcatgtacgctggttacatgattcccaagcctaagatgaagaactggttcctcgaagtgtactacacgaatccctttgcctatgctttccaagctggcctgacgaacgagttccatgaccgcacattcccctgtgttggtcgcaacctgatcccaagtggccctggctacgaagacgtcggagctgataaccaagcttgtgcgggtgttggtggtgcgttgccaggcgcgaactttgtgaccggcgatcagtatcttggataccttcactacaaacactctcaactgtggcgaaacttcggtgtcgtctgggcctggtggggtttcttcgccgtcctgacagttattttcacatcctactggaaagcagctggtaacggtggtgcttctcttctcattccccgcgagaaactcaaggcgcacaatgctgccatctgcgatgaagaggcgcaacgcaacgagaaggcccgcaaccacgaaacccccgatgcccccgccgaggttgacgaagggaatctcacccggaacacctctatctttacctggagaaacctcacatacactgtctcaacccccaccggtgatcgcgtgctgttggataacattaacggatgggtcaagcccggcatgctcggcgctctcatgggatcttctggtgcaggcaaaacgacactgcttgatgtgcttgctcagcgtaagacagacggtactatcaacggttctatcatggtcgatggccgtgagctcccggtttctttccagagaatggctggatactgcgaacaactggatgttcacgagccatttgcaaccgtgagagaagcacttgaattctctgccctccttcgccagtctcgcgacacccctcgggaagaaaagatcaagtacgttaacactatcatcgaccttctcgagctccacgacctggcagatactctgattggtaccactggaaacggtctcagtgtcgaacaaagaaagcgtgttacaattggtgtcgaactggtctccaagcctagtattctgatcttcttggacgagcccacctccggtctggatggacaatctgcctataacaccgttcgtttccttcgcaaattggctgatgttggtcaagctgttttggtaagtcttcaatctcctcaactacaagatcatattgctaacaagtcatgttctaggtaacaattcaccagccttccgcgcagcttttcgctcaattcgatactctccttctcctcgcaaggggtggaaagactgtctactttggagacatcggtgaaaatgcgagcagcatcaagaaatactttggccaatacggtgccgtctgtcctaccgagtccaacccagctgaattcatgattgacgttgttactggtggtatcgaggctgtcaaggacaaggactggcatcagatctggctcgactcccctgagcaaagccagatgatcacggaactggacagaatgattgaggacgctgcttccaagccccccggaacagtcgatgatggttatgatttctctatgcctctttgggaccagatcaagatcgtcacccagcggatgaatgtcgcgcttttccgaaacaccgactacatcaacaacaagttcgagcttcacatcatctccgccgctctcaatggtttctccttctggcgtcctggcccaagtatcatcgctctgaatctgaagatgttctccatctggaacttcgttttcgtcgcccccggtgtcatcaaccagcttcaacctctcttcatccagcgtcgtgatatttacgatactcgcgagaagaagtccaagatgtactcctggattgccttcgtcactggattgattgtttccgagttcccatacctctgcatctgtgccgttctctacttcgcctgttggtactaccccgtttggagacttccccatgactccaaccgatctggtgccaccttcttcatgatgttggtctacgagctcatttacaccggtattggtcaattcatcgccgcttattcgcccaacgcaaccttcgctgcgcttgtgaaccctctgatcatcagtaccctcgtcatcttctgtggtgtcttggttccatacgatgagctcaacgtgttctggcgtttctggatgtactacctcaaccccttcaactacgtcgtcaacggcatgttgaccttcggtatctggggtgccaaggtcgtctgcaatgaagatgagtacgctttcttcgacccgcccaacggcacctgcgcggattacctgtcggactacatggctggcactggtaagggtatcaacttgctcaaccccgatgctacctccgcctgcaaggtctgccaatacaaatctggaagcgagttccttaacactctccacatcaagaactacaccaccggatggagaaacattggtatcgcctggatcttcgccttcagtggatacgctttggtgttcggtctcatgaagttgagaaccaaggcttccaagaaggctgagtaggttgagcgtctgttcatcctttctctcaaaaggccatcatctcctcgggatcctcattacttgagctttcccctttcccgatctttcctcctattttctcactatttccttcttcacttcttccgttccttagaggactatttccccaaattttgccatacattcactacccagcccttcattcatggagccctgcacctgcgaatctcgatcctctagtcatcgagcatatttgtcatttccccgcatacatgttattagctagcatatagactgcatatagatcatagaccataaccatatagaatatagattgtcattctcaaaatgttgaccaaagaatcctcttcgagattaaattgtagcagttagaagatcattgatgtaggcattgcttgtttacatccaatttgtctggcctccctttactcctctaactagttatgattctttgtctttcaatctatgtcgctttgtgcacatgggaagctatttcgaaaaatccatgacagtagtccaatcatcaataattacttcttatttcttagtgacgtactgtacgtgcgtcacatatgtacgtgatatatatccacaagcccaaaagggaaacaaaagcatagatatatttccgaggtagtcgattcagactagtaatatgaacccgtattccaactctccgggttagccgccagtatgagaaatgtacaacatgcgggctactttctgaattttaccaatatccaaattgtgatgaagttgcatcaagactcaggaccacaagctggcgtgtggagatgcgtccatggatgtactggagaaattatccggagagccgagattgtgacacatatcccaccttcccgattaggcagtattcgaaaagtaactccaaaatagaaagcggaaagaaaaaggtctccaagattgtagatccatgattacctccaccgagcgaaaagatacagacccgaatgctcaaggggaaatgacggggtcgacccagcgtcatgggccaaccttggaagaaggaccatttgcatttctcgcatggccgatcattgcctaattattgtaagctgataccgacaacatggaacctccagccatacttaaactctctcattcataggagtacggagtagcttaccccaatttcccctgggggacatgaaaatcggagggacattgcgcgatgctgcacgcgagtggaaactcgcccgatgaagaacttgggatctgcacacgagctggttttctgcaggaactgtgatgagcactttcttgtttgagaaaaaaaaagaaaagaaaagtgcctccccgcatttcccgacaaaaatttgggtggcataggataggctagaatttctcatcacatcccagacacacaagcacgggtattactgtgttgcccaggaagcattgctgatcgctccatatatctccttttgtagaaatctggcttaggtggggagaggcattgaaaaatgggttgcgggtaagaccctcaagctagttgaacaagagagtattccgtacgctgtcatgataatctcgggaaatgtagagtttgaatgcatgctctttgtccatttcgcacagaaaccgtccttgttcccgcctcttttctatcacatcatccagccaagcaaagatcagcagtgatagagtaatagtggagtgaaataataggcgtggcgtcataagaacaaaaagcaaaagctccgccgtgagccttctcctcgtgtacctgtcgggctttgccacttgtgtggtcctttggagcaaataattgttgacttcagacatagtgcccattctcggctaagcgggatccttgctggaacaacaaacaatgtatgagttggggagaaaaagcggatgtgatgagtttgccgttgaagccataaatcatttggttcggcttaagcctcaagtccttatttccacatatggcgcggtgacgggataattgttcataaattgcatcaggtgagacttgtgctatgtcgaaggttacgaaacagaattctggaaacagtggagctgatgcgatcgcgcttgaaactggtaatgtggaggttgtttcatctcgggtgaaaatgagactctctcagtatacttcatagattagttcagtgaagccaaaggaataagttgtaatgattttggaagtgttgtcaagacgtgctggtatccacgtgacacgggcgcgtagtcacatgtttgtttttgtttcctcggcatctgcagtctcaataataggattacaggatcaataatctattctaggttctgactacggaatacggagtattgcccactctactctataaacatacaacatacaacatacggagtacggagtacggagtacatcgtattaaattctcccctctatcacgtcgccagcgcggatgcgagggcgatccccctctaaccgtgccgtcccgcactatacatactgagaatgattcaattagtctaacgcctatcatattgcccctttcatcccgtccccaaaaaaaatggcccaggtgtggggagtgcggtctacggtcagcacattacaatacatataaggaccagcgaaactattgatacaacggcctgacgcgacacaaagttatcaatagtctacggagtaccgtctgtactcctatgagaacgatatgtccatcatcatggtgggcgatcattatacaatatataagccgtacggagcacgcagtgcctggcgcgttcctccatccaaagccaagatagccttcttgtggggcacttcgagtcagcaagatccttcgttaatcgttttgccatggccatctttttgataggccctgctagttttctaggccccccacgcactctcaaacccctgctcattgcgcaacggccaagccgattcaggggcattgacagggattgtgctgttagtcccgcattgcaattcaatcacgtgagacgtcaaacaaagaactcgaacagccgggatctcaatgacgctttgagttgcatgccccgaaactacggtgacctcaaatcagtttcccggtatggaatacaaggtatgtaggttctggcctcgaactctaagaaaactttagaactgcacagccgcccccctattcaaatttgaggggacgttaaactattgattttaaagcagaacgagatagagtagctgtacccagcttagggtttgaaattaattaatactgacagttaatggacttcacaaagtggatttatgagcacatccccaagcccctgactgcgagcctccaccaaggcaaatccgagtcattgtccctggaaccggaagctctcccgcgagcacacgccccataactaggccaaaaagtgaaagggaaaaaaagctgtgatccaattttgggcaatgctctatctacctggttgaaatgtgggctctctggacgcgattatcgcccgtcccaatctaacatctcagatcccgcacaaagagataacaaagaaccatatcgcgcgtggcggtccagccggtcgattctcatctaggacattgcgtctatcccagtccgttcattgtgccgctcgtttgatgcatccgactgcttgacaggtacacggtaacataagctgtcatatacaatctattagtggcgtcggggatgtccaataccgaaaatagaggcgcagactagcccctaatcccggagacaggtaccgtctagaccgtggcgcggaaacgtgctagccagccgtgcgcgtccgccttctagtggctttctagacatcgcgcggaggcctttccggttaacttaggcttggaggatttcattttcgtgtgggtttctccttaaggcgaaatgaactgtggagtgtcataagtgtcatgagtggagatgtgtgcgtagcttctatctttctttgttgattgccttcatatcgccccatctgcgactattcctgggccgttctctttcatgcgccagtctaagtggggtctcgtattgaatcggcgatgtgaaacttacgccgtatgtattgttgaccgttacgatctagcaaattactatacaaggtccggtattatgtacttgttctcggggtactttttaccgctcactggatccctgtactagtctatcaattctaccattttagatggtctagatgtctaggattatctatctgctttttgggctgcttgcaatatccatacgattgtaaagaatttgcggagtacgaagtatactctgttattgaatggatactccccccaccgtgatttcatgagcttgcattatacatatacagtactctgtatgtatgttcttcattttttaactcgaactgtttgtcaatacaaagtacatcctataataaatttaggtatagatgcatgggccatgttacccctgtagacatcaaggtttcgtctttccgctcgcatccatggatgagctgcgttaaatttaatgtttaaaattcgttaatcgggttctttagtgatatacacacgctcaatgtggttgttatggtgcagtatttcaacttgattatttgactaacattattttgagcaagagcttaggctcgatatatagatcaagagggtgtacggagtttgtagctgacaattcacaacatacgaatcacgatacagcgagatatgatcttcgaatatgctctatttcgagattgaactgaatagtctagtaaatctaatagactgtgacacagcgtggttacacaatcgcaatcgtggggtaaaaggccatgaaagaacagcattctctcagccatcaatagaacctcgaaaacccggcgagaaagcataacacaacttcgaataaaaatatagtaaggaaccatttctgcttcccaaatcacattagaccctatagcagaccgactttattgagatcataaccaaaattgtaaggtttgagcgcgatcttgcagccgaatgcaggtacctgccgcataaaactgcagtgttctttcagcctcaaccgttcaccgcatctcaacaaccaaggccacgaggtgacacaagataatctcgaagacttaggccgacagccttcggattgtctgaatgcgcttccgcgtgttggttattggaggttgtgctacaagatggtgaggatagattatatggatgtgtctttcatgttgccaagcaatatatatttgaaaatctcaaggtctcaactaggttgtagtctaatacagaatctttctacgcggtcattcctatccgtggatatatatcggcgagacaagacatattcaactagtaggctactccataccacctgcatccaatagaggctctgtctaaacgaaagctacgtctggaacctcgtctactactctgactgcatagcataattatacatcgctatttggcacgttccactgaccctcggataccaacgtggatattcaagacatctcagatctctagcatgctttcttccagcaattgccctatgaggctaaccatgagtaagattgcatctgaagattagtatcttgctaatccgccgcaagtaagccggtcatctcccatacgagagcagtacgagaactagatcatgtcgcacgaaagagatacatttcggtggaggtatcacccgaggtaatcctccagcaaaaatacgctgacatcacgcagagacacatgtgtctatcaccgaacccattgctgatccggattaacaagactccttcctaaacgggcatatggatgccggtcgggctcctcaacctcggggaacattaaacagaccaaactaaatgtgacgatatcactttcccccgacgatctcttgtcaactagacgggttctgcagctcaactgcacaatggctatagtccaaagtcccttgggagaacgaccgtgcatgccccactacttgggcacgagtctgccggaacgtgatgtgctcgtgctatacagctagctgataaaatcgcaagctagcaagttaagctaatggactacatgcatatgcaggggtgattgatttgtgctgtacggagtactccgtacaccgtaggtaagatcgatgcgccatgagacaagcaaacagtttctctgagaccacgcgggctgacccgtcaattgtatcacgctatgagttgcattgtgcgacttgtttttgtttacagtgtattttcctgagatagtaagagattaagagagacaaagttccgaacctgaccataaccaaaccgggtgtaaatttgagtagcctcaatatcggttcgacgcgatttatatacgcgaccggtaaaaagcagatcatctccattagagatagaatgggacttggtccaggcaccacccctctgccactctgccatggctttgaacccgactactccgtacggcacggacattcgacccattgaaggtatggcccgcagatcgcattttgcttgcccacctaatgtgatggatatagagggggcttgcattaccctagtatgatagccgttggttggacccccacgagggcgagacgttcggagtatttttatttttttggttaagctgccaatgctgtttaggagctctagtcggctcggttgatagcttcgctgacatacattagtcgcacattagtttataggaactatcacattttgctctttcccaaggaggcaaatatcccagaacatgtgacgggcaaccaatgcatgaggagaaataattatgcgctttgcacatttcaatgttgactggcgactgcaggatcaccgagtttacgtagttctgcgaatcggttggtcgaactacgggaggacgtgcgacgcaactgtgatggggaatgggagaatggccctatggatactatgatggtcatagttgtgtattacgagctcgatactaagtgtctttctccaagcctagaccgtgggttattcaattttgcgatggttcgctcaactgttccgatgaggacctcagaacgcgttgaccagatattcgtatattccacctagcgtttatagaaaatattccgaagttcattttaagtcgaggtacttcgtacattctattgcaaggcaaaagtacatcgaattttttcaccggcaaggtactcccgtatctcgcctcgcatctattattattcgaggtcttagacatgagcgggtccgcatcatgagatccccctccacgtactccatagctacgatctagcaaggattgaggatgcctacaacgtatgcaagcatcgggtagcgttgcgacagtgtttgctcaactttttcgcaactcgcaacagccaccgtttgtggatcctgtttgccaattacgaacctgttcctacgattatcgccccacgcgggagggggaaagaaaaggagggggatcgcagtatggtacggagtactcggtacaacgtacatacaaactggtctgaatgtcaatagagaccgaggtctggacaagggggtgagcagggatattgggatttttgatgtgaggtacggatcaccgagggatatggaccctatttgcaatccgctggaaatcaaccataacggtcagaataaaaaaaaggcttttggctgctgtcacattgggggccactgcgttgtcgatctcatcccggagagatattgatgacaggcgaacaaaagacccccgtccgtcacttttaatgattgatcgagtctccctgcaggctctagcacacaacacggtcaatgcattttaagacatgaacctaaccccacaggatttatttggttagggcaatgtgattggtctcagacgggagtagcattccaattctaacaaattaaaacggagaatttgtcgtggaaggtctggaacagagctcggcggacgcaaggtggatagtgagttgatacatgtgagatgtgtaccttttcggcgggttattagggttgaaggtacctcctgacctggtaccgtgttatgaagtgagtagataggccaactcttggggaagaagggctatctccaaggccggtttttttttgttggatttcttctcttgctattactgtaatgatctcaatcttggatcttcttaccaaagataccccgtagatactattgaatacatgttgtctgcacataatcccaaaagaataattagccaaatccaaataatgaaaaaaacagaaaaaacaaataaaaaacaaaacgcaggaattaaaatacggccttcggtatgcgtacggtacatcgccatacgggctcataccaggtggagcgtggatcgtcccgatcgagtcccagaagattcaacctttagccctttcaaactcccaaagagctattattcctcttatttccctcttttcccttctccttttgattcaaagctctcttcattttccactttttgtactgttgctaccggtagcaatcgcgatacttagctatacttagcattctttcacttatatcccttccgcccttgcgttgccttaatagggaatccctcttttccagctttgcgtacagtccttgctgcgatccttagcatcttgccactctccccttcataggcatttgcattatttatccattggaagctgttcatcccttgatattgggacctcgttgcgactcgtcatccctccgggaccttgaataatccggactccttgaaaggaagtctgtttggatctgtttatagttttcgattacttgttaatattgcttcttgtgtttgtatgtccagtgcaaagttcctaaatccttcccctctcctggcattcctagccctcaacctccttgggcgcattccaatcattcaatccctccagggctatactctatactatccttgagccccccaattgacctagattgtgtaggatcaaccccagcctctggcgatctgattcctcccctccatccttgattatccaacgccacttcgcctacgatacttgactttcttttggatccattgagccatgtccattgcacttatcgaataaacgcccccggtcagtgacctcaacggcgagaaagaaattactcagtcacgatatacccaagagatggaatcaatgaagccacatatccccccattgaagatctcgaaatccaattcgaatttatccgagtcgagcaacgacgctacatctataccgattcgatcttactccggctggggctcatcagatatgacccctccgttaacgccacaaaacgcccaggacacaaacatggatcaattggaagccccgaggcctgtctttcacaactatctgcgcgccttctacccttttcacccggctggcaatgtctctccttcgaccgttacactcccgctggaccagggagatatcattttggtacactccgttcacaccaatggctgggccgatggtacattattagattctgggaatcgcggctggttacccacgaattactgcgaggcttacgaccaattacccatgcgtcctttgttgaaggccttgactgatttctgggatatcattcgaggaaacttcgggtcatcactgaaggactttggaaatcaagacttgatgagaggccctatcgctggcgtccgctttctactagtaagtatgaattagaaccgagaaacaattacggggcttatcattccacaggaaaaatcagaatgtcttactcgagaatccgctctggtaaggcgatttgagggactacgcagaattcgaaaggctttgctatctgacctgtcttcgctggtgaaaactgcgaaaaagttccaggaaattgcaaacgggctcccgtcagaagacgaggttgaggccattctggatgagatgcttctcaaggctttcaagattgttactagaggagttcgattcctcgacgtctggaacgaggaggtaggcttgggtcggactatcgccgagatggatgggcccaacgaaagctcaggccagtatagcatgccaccgactcctgcatccgaaactttcaacttgggcgagaacgagggacctgatcgatctgcgtcgcgaatgctggaatcacgaatggaccatagccggatggatatgagtcgatcatcgatgcgcacggagatggttgatcctagaccggcctccgtcgctaccaaacgggtttctgtatcccaccgcatgtcagtctccggcccttcgactgccatcgttgcccagaatctggcatccgaacgcctgggaacaacatatgatgcattcctcggcgtacttggctcattcctcgggttccatatgcagtcccgctcctcgatggagttggttgtcactacacagcaggctgtcgaggcatgcaagcaattgctaaacgtcattgaggtagtatgtgagcatggtacacatcgcagcgcgtttctcgaacaggcacgagagttaatgtgggagaagctatctgagctcgttcacgctgcacgcgacgtgtttcgtcccgcacaaatgccagaagatgatctatttttcatggtagatgaaggaaaacgccttgtgggtgctgcgactgactgtgtccgagcagctggaaactgtttggccaaggctcgcctggtgcttgagcaaattggtgaccttgagcttgaccctgaacacttcgaagaggaaagacaggaattgtctggcgttgcctctccacaagatgaaccgcagactcccgtagaagaagagcgacaggagttgtcacgtcttcccccacctcctcttcagatccctagcacacctgctctcaccgacgctacaacaccttcatcctttcagtctctacctgcaaattcccccgccaacatcaccgccatttcttctttacctaattctgccatactccccacccacctcgagaacatctcttccttctcctccactgacagtaactaccgtgaaagtcaccccaagtctgatatgagcgaatcattcggacgtggaattacaagcaatggcagcagcttcacgtataatagccatgcacgtgattctgagatgagtggcgtttcccaaacctcgactcgggctacctcgcctgatattgggggtagcttccagggtagcttcaaggttcactcgctgaaggagagtctgagctactcgaccctcgccgaggaaaatgaggagactgaggccaacatcttggagaagactttcgcacacgaacttatttacaaggaaggttcggtgatgggcgggagtttgcgtgctcttattgagaagctgactgctcatcaatctacccccgatgccatgtttgtttcaaccttctacctcaccttccgtctgtttgccacgcctcttgagtttgccgaggccctcgctgaacgcttcgactatattggtgagacaccccacgccgccggacccgtccgtctgcgtgtatacaacatcttcaagggctggctcgagtcgcactggcgccacgatcgcgacaacacggccctggagttcatcgtcgacttcgcaagcacacgactcatggcggaccttcccactgctggtatgaggttgcttgatttggccggcaaggtgtcctccgttggtggccctcttgtgcctcgcctgatatcttccatgggcaagaccaacacttccattgcccaatacattcaccccgatacccccttaccccctcccatccttggcaagaaggagcaccacttgctcaagcaatggaagaacggtgaagcctctataaccatccttgacttcgacccacttgagctcgcccgccagctcaccattaaggagtcacgcattttctgctcgatccttcccgaggaactgctgaacacggaatggactccaaagtcaggatcgttggctgtgaacgttcgcgccatgtcaactctctcgactgacctcgcccacctcgttgctgactctatcctatacctcgaggagcctaagaagcgtgccgctaccatcaagcactgggtcaagattgcgaacaaatgtctagagttgaacaactacgactccctcatggcgataatctgctcattgaactcgtctatgatctctcgactgaagaagacctgggacatcgtatcgcagaagaccaagactgtcctcgagcagctctgcggtatcgtggatgtgtctcgcaactacgcagtactccgtcagcgccttcagaaccacgtccctccttgccttccatttgtcggtacctacctgaccgacctcaccttcgtcgaccacggcaaccaatctctccgcaccctctccacccatgacagtgaaatgactgtcatcaacttcgacaagcacatgaagacagcccgcattatcagcgagctccaacggttccagatcccctaccgtctgaccgaagtcccagagctacaggtctggatgcagaatgagtttgtgcgcgtgcgctcaaacggcgaaatcaccacacaaaccttctaccgccgctctctggttctcgagcccagagaagcctcccgcagcgcaaacaaccttcagtcccagtccgagcccatgccttccatgcttgacaatgccaaggacaagttcgacttcctctcatggaccaaccatcccaaggcgaagtccgtcccgacacacggataactcactcactactatacaccatcacctatcccatccctcagaacctaatgactgatgacttcttcttctcattcccactttactggtgtccacatccacatcatcttaaccattctattatgcatacgtgcatcaattttctcaaaacccatcttcttacgatttgtgaatatcccatcattcttgtcttacctttttactttttttattttactcttgggtttcttgtgtcttgtttttgcgatttctcgttcgagagatgcagcatttgaaaaagcggctatgtatggaacggggcctgggactacccaaatggagtttaccaaaggccttgctctgttatgtttttttagtttgatttctttcttgtctggtctgttcttatttcggctggggacgggggaaacaaggatgggactggaaaaatggtttcttatctgtcaactgggcgttttcctaatcggataccctctagacaatatttcggcctcacggcttttgtacaggagcaactcttaaaagctgcctgaaaaactgaaatgcaacatacgctttaattcaacagttttcttctgaaccattgtaactgtagactgtagactgtaaatgtacctctgtctgcctcgtacagtgccgacgtggccgctatgctgaattttcttcagtacatgtaaggaaaatgttcagaggatctcggttttgaataccagagaaccccttcaccgtatattccagccgacaaaccacttcaagacattcagatgctcaggagagcctaaatgtctctcgacaccagcactccggacattgaaaataatacttagaatgccaatggctgaccgcattatcccacatttcaggttcgacccccatttccaagtacttgtcttcgtagccatcccagtactgtattcgtcgtgtgcgataccttaggcagtcgcagcaaaggccaatatttgcttcaggtcgaccggaattgtcacggggtgctattcgccttaggagagtgaatatatcaacacaggttgatggtggaagaaatctgtgcttgggtactgatggtatgcgaattcggacaagtgatgagacgtgtagcaggcgcttgcatgtcaacgcaaggcacattcgatccagatgttcacatttgttgaggatatcaacgattagttcgggaggtaagctaagtagattgcaggtgatttgtggttctgctacgaggatctgagagggattagatagtgaaggacccgtcaggaatttgagtcggtctagaagtgctcacgttggatggccgcttgaaacggtgccgacaagaatgagtggatgttggtaatgctgacatcgtatcgttatggtgggcaaattttcttgacgcgccagggtgtttgttgacttgacggcgcgaaggagcagagccgcaaaaggttaaatgcatggttctgtggggttgatgcctgaattatagaccgttcaagacatgattcgggacctgggtgcaagtttgacaactcttgattgatatatcacctactgtacacatcgtcatttcgtttaaacatattttgcattatcgaaatccctaattccctatacaagagccttagactaaccaactatgttacataacgtgttctaaacgcctccacgaaattcatgccgtcattgtcatcataagcagatgcaccggtatccaagtcgagcggcaatgaaacagcagtctcggagagcgttcgtaaatcaagtataggaatcattgaaggacggccgtgggcgcattgaaacgggaaggcacaatcggccagcctggagaccaaggcctggcactcttcgatgttcaacgagtcattgaacatgatagcagtgcgacaggcccgggaatttaataggtccacgatgccttgagggcatccattcatatgttgaacccatgagcgcgaggcggacgattttagggttcctttgtgtacaacgtcatcgctgtctgatagttcgatatcctggtcggcatattccgtttcaaatgccttcttcgactggaacggcttcctaccatcttcctcacttgaccaaatctcacgcctcatcaagtcaatcaacacgcgaggctcgagccgacagcgttcggctattaggacagggacagtgtggacggtgatcgagacagtagatttggtttcgccttgtgtcacatactcaataccccaggccgagaagagagccatatatttttggaagaggtcaccctctgttgacgaaacttcgaatgctagagagccgacttggacagtccgcactcgacaactcgactccaaattctcacccagctcagcagagagaaacatctccttgaacaactgttcgattcggcatcgctcatcggccgcgtgctgatcgattaagagtagaacatcgtttgatgtctcctccaaattgggaatgacgggagtcgtgtggaccttagccaagatgaacttgttgtccacctgggctatcacttcggcagtctcgagcgcacggcgttgaagcttgcctcgatatttggcaacttgcgctgtatcaagcgatccaatgcctttgaagcagccgtgcgaagaagtaattacattctgctgaccgacggactctgcgcctagatttggtattggcatttctgttcggctgaaggaaggattgtcccatttccctaacagattttctatccaaaatgtttgcactggatgcttggacgaggcgttggcgcaatcggtggaagaccgatgggtagctaatgacttctgggcgtccatcgtttggcccgttcgagaattaatcatataggccatcttggtgtatggatcgatccagctgatcatcttgtctgatggcgagtctccaggcagatcctctgtcctgttcctgtcctcaccggagactcttttattcgggtggtttggaataattctgcactcctggccatcatttggatggtttgacttatggttagggaggatcggcaaggagctctcaccctgtattatattaggagccgcatgggaaagccgagatgtttgatgggttggagaacgtcctttgggacccttagcggcttttatcctggaccagttgtcgaagctttgaccagagtttagagactgtgctcttggaaaggaggggatttttagacgaccgctgaacacctcttcggtgctagaaatagaccgaccttgttgtagagggccacgagaaccacgagaactgccagctgctcgagaggctttggaacggatactctggttttggtgtgataaaatggtctgctgtttgcggttacgagggcggagattgtgttgcttcagaaactcatgaaccatggccccaagcacatcaactatacgctgaaccgatttggccgactctggaagattcacagacgcatcgtcgcccaatcgtataacagcgtttgtgtcaatgcgaatgtaaaacattggccacttattgacgggctttgcccagcttcgagtgcttgcgttacttggggcatcaagctgattcaacgaagatgagcttctgtgggaaatggctccaacattactgaaatcagactcagcaaatagccgatttacttcgtcataaagcacatttgtgctgttgcgcgataggatggggtctttccccaaagagatgaactgaaccttccgacttgggctgggttggagagatattgctccccgaactatcaggtcagaaaccgaggctgaaattgcatgccaagaatcgaagtttggtgatgtgatcagcccggattgtgtcagaattgacccgacacgtttgagatcaaaatccttctgagcatgaggaatgcacgcttcgggtatagaggtagttccaagacgaatagaaatccgtttatttcgttccacatcgaggaggactaattttgagaattgagggttggctaaaaggagagacaccaaagagttcctgagatggtcccactcccgttctagctcgtccggccgctgaagagtgagagctcgactcttgactcgaactggcatgttcccaaaaaggtcattgacagttatagatgtgccatggccggcaaagcgaagcacctggtgtggtggtgcaggggttagccgagccacaggtgtcgaatgatgaagtatgattgagtttgtgcatccatgatgaatgtgatgagaagtcacagtgagcagagacaccgaggccagggaagccaagaacaagccccgatggccatacaagccactcagctcgaatttggatgtatctatcgcatatgttagctagcataaataatcctaaggttgggagacatgcgatgaggtttgcctagccctccggtaacttcaaactcggccggagggattccatcaccatcatcttcaactatacagccaccacgcttgaaatcgacagtgacgaagacggtatgtgcattggcatccaaagaatttttgactagctccaaaatgacaccagtcagatgcaaaatggatgtagatgatttgatctttgcaaccacttcagaaggtagcgcttgtatcatagaccgagaaggaggcattgacgcagttgtattcaccggggcattgtgccactagatgcaagaaagatcccaaaatggatcctggaaacagtactataaatacgcatttcaatcatgatcacctgtcattgtcgctggtagaacctttccaataggtaccagtcaatgacttgcgaaaaataaaacgaccgaaatgttgagaatacgtcacacaatagaagtcgagaggcaatatcgaaggcaggcacatgacgtgcgcggataaacagtctccccgcccgctgccccatctgccgcggcgcgacttgatgcccagagctctacttactcccctgcctacctttgacatttcgcaagcaagagtggttagtgactaggctacctctccaagctagaatgactactgccgatggtcctgctagggtgcatggtaagtacatatgtacagattgtgcctgttggccaccgcgaacccctgctaagggattcatacaaaacagaccggaatgcacgtcgccgcccattctcgaactgggtgaaacgcctggcgaaccttaagagctcctctgattctacgacaaatcgatggaccaacaagcgctccacgggcaataagggcaagaaggccgaccaagaaaacaacccatacccgctctctggaatcatcaaccgtgacacagggactcagacaccgaccgactcatatacagatgatcattatggtacaacatctcgttccagaagcgacccatctttctgttcgggctatgagaacccggttcccctgacaagtgcaaaatcagctgcgccaactatttcaaccaacggcgatgccgcagtatccgaagcagcgtattccaaggctgggacattggcaactggcactgaaggattaagcagccatggagggggtgagggcagcaccttctcgtcgccggtaccttcaattcgatcgatgaccactaccctgaccactgtgcactcggcagcaccctcaacccaactgtacaatgcacaaaacagccacaatgggcaccaccatggcagctcagcacagagttcttcaaaccagcaggtccaattttcccaccaattcccttcaacctcacccgccactgcagtcccctcgcacctggcaccacaaagtcatgcgatgacgtacagcgctgcaaccgcgaacaatgctttgaccgataacgcttctcttctcaccttggcaagctcatccaagcgccgtcgccgcaactccctagataccaatgcgtctgtacgcgggttggctccgtcttctgttttcggcgggagtcgggagagcttgccgctgagtgttctgagtggaaatacgactgaagcatccaatacctcagtattcaatgcgtcgggggtactgagccgaccgagtattgttggccttgctagtgctgaacgcatcagtgtctactcggcctccggagcaattccgctagccaccactactgcggagcggggcggcttatacactactaagcaaaccgtcggcggtgatacggccagcattcgcagcgttgtccaatcgcacagccgacatgacagtactggtgccagtatctccgggggtattagcagtccatatgccgtggctggtcgcatgagtcgaagaagttctggctggggagaaattaccggcgaggaaggtaatgaaggaaagccagttgagaaaaacgaggatgaagccgcaattaaggatggtaacggctttcccgttgagcggcttaaggcatgattccacttcgcacgtaccggcataccttccagtaacgattgaacggtgaggtgtgcttgaatgaaattccggatggacatttcgaaagcttgagcgaagtatcagtgatccgctactacataatgacttgatgcatggcaatcttccaaggacttgggtattcttaatggtttggcggcgttttctaggcttggactttgataccctatgcggtatggacaaattatttctactcaatccatattgcatgcaactcagatctttcgtgtattcattagatctccctagagtccgcttcgggcgtttttatctctacctaccagttggccctcggacaccccttttcatcggcgccgaatgaccatgggcatatcgtactgatacacgaaccaggcattttgatagttccatttatgcttggggtcgaccaattgaatctataccgcgagttagcaccaaaaagctggaatccaacaaacgccaataaaccactcacatcgaacgaggtgtacagcgacgcgatcagctttttgatctccaacgtagcgagataccggcccatgcaaacccggcctccgccgccgaaagataagtcgacagtatccttcatccgacgcaggcgaacctcgaagttctccgggctttcgtccttgccctgcagccagcgatccggattgaagtcatccgcatcatccccgaacactccgaaatcacggttcgtgacaaaggggttaatcccgaccttggtacccgcggggagatatcgtccgtccggaagcgtgaatccaccctctggaacgatacgctcgaagatcatggcaataccagggttgacgcgcagggcttcacgaatgacggcatccaggtacggcaagtcgcggatctccttccagggagcgggggcagagataccggcggattgaaattcggcgacaagtctggccgtcgcagcaggtgatttggctaggtagtaaacggcagcacgcatggtggctgagcttgtgtcgcctccagcgagaatgctcagcatcagccagttaacaatttggttgtcatcaacgagatcggggtacgtttctttcagctgcacatatttgtcgagcgtgtgatcgacagtaccggcggagattttcttctcagcaagctgggcctgatactcggcgacgactctgaaggcgtagaggacacctgtcaaggtgggcttgggcccaatgcgcttgattgggttcttgtcgaggaagttgtcaacccaggggatttgagagacctggtgggacgtatcagtcaccctccttgcttacgctgaatcattgatatcgcagttcttaccggtgcgaagtatctcaggccagcagtggagtctgtgatcaaattgtcgacatccttctcctggtcaatgaatccatagtgccgaccaaagctgtaattggcggtcacatcccaggcgactatgtgatgtgttagctgaaagctgcgcaggctgctagggggcatttgagagctcacagaaaccaatccattcatctgccgggcaaacctttcctgcgttatcaccatcgacaaatctcagcgcaagcttgtccacaaactttgttattgtttcatcgatgaaaggctcgtattccagaaccttagtcatggtccacaggccccggataggtcggatgttctggttatgccaatcttcatcctgggtgttgaagagattcgacattcgatggccttcaatcagtacatcattggggcggtacatatcactctttactcatggttacgactggtcagcatggcctattctcacatctaaaaggacggcattgactaggagacgatatatccaacctttttccatggattgcgagtggaataaattgtccgaattagattcgggtctgatatgctcacgcaattgggcccgacctgcaccgctgtgccatatttccgatgtaattgaacattcttcagatcaatacgtccgccatatgcatgagccgcacgccaaacatcggtgatcttcgccaacgccgggccagggatggatttcaaacgcgaaaagaacacatctgaaatcaactttgtcacaacaagcaaacccagagtggccaaggcctgggcccacaggctggaaggaagagagatcatgtccaacgtgtataatgtgcgcgcacggaagtcagtgcagtgcagtgcagcaaggggattccgagtccaattcactgccaatagttagactttcgagaagtgcaacacagtcggcagttgcagcttttcaatgcccctcgaagcccctaacccctagggctgctgagataacggcaggacgcgatttgtccatttttcaacacgagcggggttctttgcgggaaacaagtgaaagacgcgaagaagcgccaatgattctccaatgatatggaaattatatccaagtgggctttagctttcgtattctggcgcgggtggacggaatgtggagtcggtgattgattgtcgacggctatgaatggctcttcgatgacccgactttcccaatgcggctatgataaccttggctctagagcggttctgccctagcgcccggaagagataccatggatctgtaacagcctctcgttattgtgatagatccaccgccgccactaccattgtaaccgagtcaatgcacaatggcatacttgttcgtaccgggaaggcggcccaagttgaccgatcgcatcgctttgagatccacttgggaagtatgagtcccacttgctgtgacaataattaactttttcagacttcgcccctgtcgtatttcatattgtcgggacgttttagtttccgagatatgacaccctgttgacaatgcccatgcgcttgaaataatccgtggtgtgtccacatctggggacgttggatctttaaaccgacgggtataccccggactgtctgcacagcattggtgaatactcagaatgtcgtctagcgggggtgcatctctcccaccggagagccaggctcctacagtgaagggtgtgatgtggacgatgtcgatggttcctttggtcttcgttttcctgcgcttgtatgtgcgagtatacatgcggagagtgtttggctgggatgacggcattgcaatcgcggcaattgtaagggactccttttcgtgactgactgacttggatgatcttgctaacttcaattcccttggtagggttgtctgattggatacgctgctgtctcccatgtcgctgcaaacctgggattagggcaacaccttgaaattgtccagaaaaaccccgataacctcatccaggtggcgctcttatgcaacattggcgaatctctggcaatcattgcatgcaccctcggcaagacgtcctttgctgtcacattgcttcggatcgtggtccgcagatggatggttattttgctatggttcgtgattgttacaatgaacattgtcaacatcttggctgcgctctttgtcttcctgcaatgcaaagatcctcggcatctgtggaatccgatgatcccatcggagtgttggccgtcgcatatctttacgcatttctctctctttgttggtggtgagtctgctcgcagaagtctgctttggttgtgattgacgactaacacgtaaactccctcagcttattctggagcacaagatttcgtcctagccctgctaccatggacgattgtgtggaatttgcaaatgaagaagaaggaaaagcttggtgtggccgttgcaatgagtcttggaatcttgtaagtccttgggcggaagcccttgcaaacctcgaaccgtcccacatgctgattgacttatctcttcaagtgcaggcgcagcatccatagtcaagaccatccacctcgtggccctctcagccaaatccgacttcacatgtacgccaccattgttaccttcttcgtctcttgtcaggactaatttgctttctttgcttaggggaactcgctcccttattaatctgggcagcagttgaagacggtctcgctatcaccgctgcatctattcccgcgcttaagcctctcttgacaaggatgttccccagcacatcagcggacagttataacatgatcgcgtatccaaaacagccccccagccgcaagatattcgacaactcccagggcgaaacgcagacggatattggacacacgagtgttcatgacacgggaagtcaaacagcgatcctagagcctatcgttccaaagggcgaaaatatcaatatgataaccgaggtgtcggtgacctataatcacggctcgtgaaggactttgagacagaagaatcaccacaagcaacgggaagcggtcgaccttaacatgcgaatataattactctcaatagacgatttcatctggatttcatgaccatagaccctaattgtttgtctcaagtcgtaaccccgttcgtggtgcgagaaggtcagggtaaatctcgtggccctgtatgatttgtttatacccacttcgagtatctcacttgacagtaatctgagatgttgaatttaatggaagatttcttcgggaatgaaagatgagagatctgggagaggcctaaacagtgcaacgtgatatgccaaatatataacacgtggagaaagacctagttacaatagttggaaaaagtcactcaagaggaaaatatttagtctgctggtgctctccctaacagtagaaagtcgaccgtgattatttccccctctgcatcgttactatccccgtctccaaagtatctcgtggttgcttagtttcaaaccagaagctgcccagaactaaatagcgacgacttggtggggaccgtaccaagcccggtcgaccgcatgtaacaagctctgtcattaccgtctgttttccacatgaatcgcacacacttcttagcgcccttgtagttggcgcacttctcagcgcagtccttgaaagagttcgccctgccagtacccaagtctgctggtccggggtcatcaactttccagaagttagcatggcatgtccctactatgagattttatagggtagacaaacgcttagcatagtgaatcttgaatttctcgtttccagccgtgataatgcattgatcgtcgcgaagctctgtgactcagtggtcagtatcggttgagcagtgaaatgcgataccgcgggagtcattgaattttattacttaccggcgtcgaaaaggtttgtgcggcattttccatcggcgccttctccgttgcaattgacattgagagcatcatacgactgctggagcgtgtctagtttgcctttgagcgatgtgatctgcgagttgagggcggtgatctcatcatttttattggtgagatccagagccaatttgttcttgtcgttctcgcactgctgcttctggatgctgaggtcgcccttttctgattcacacttatgttgctccgcacgacattcttttttcttctcttcaatttcaccagagtggcgacggcagtcctcttcggcactctgggccgtcagcttgtccgcttcgcattgcgccaatttcgctggatccacttggtttgtttgacatatttcgaggttgtgcttagcttgctctaggtcattttggcaggtgtccttgctattgtcgcactccttcttatcctgaaggcactgttccttctctttggcgcattgttccttctcctccacgtacttttcgcactgcggttcgggagtcggggggccgatattctcgattttaacgattgacataaacttggttgcctgctgttgatctttattgctgctaaggacgaagaagcagttgccggctttgtgatcacccagtgttctgaaggaaattgcctcgcagtcctctgacgcgcagagcgaagcacattcgagggcattggccgccggcctgctgattttattcagcgaagacaggatagtcttgcaagtccatttccaacggccattaccaataacaacctcgtcttcttgcttgtctggattagagcagcatgcgttacgatcatccgactccaaacaggatggaaatacctccgtaaaggtaatccactcttcatcggacctctgatccaggttgtctcctaggacaaagaagcagttgtttccgcggggtggcttgccgtgtgccttgaaagatgatgcttcacaggacaggtcatctgcacagagtgatgcacactcgtgggcattgctgactttttgggctgttttgggattgagagaccccaaggccgatccgcaagtgaacttgaaggtgcggtcatcaattgtcacctcaccagtgggagtgggcgcaccactggtacagcagtcattaggagtagctgaggacaggcataccgagccgacgccgattgggatttggttggcgaaggccgaagccgcgcctagcagcaagaggaatgatttggcagtcatcgtcaatcaagaaacaaaagaaagaactgtctctggttgtcgcagaaaggcaagaggaattgcaggtgctcaaagcttgaataaatagcatagcgacacggccaggtcctccacaaccccttttctctcccccgcgttatagccccactttgatattaagacatgatgcaaagtactactccataagcgatcattaaggagagaagaggtgtcaaaatcatagatcgagtgataagttacattggtggacctggaagtgggtagctggagtgggtagctggagtgggtagctggagtgggtagctaggactctgggatggccagatgattcggttcagctcagcttctgcaggatgtggagctggaaaattgcagatccccagaaagcctaaaaggagaagataagccaactgcggaacgaatgaaaaatcggtaaatggccaattttatgcaggcaacaaaagccaatataagcaaagtcgtccgtggtcgctagttcgatgtgatcgaccgctgttatggaagaaacatctaagaatatcgatttgctgggcactgcctataaaaagccctaataccgccttccggatccgtcacgcggagtccactttctaatttccggcccgttccgcggggaaccggtgggtcgagccttccaacttatcaataacgtcatgccagggagtacgtacagctcccgtcagatagatgcactcaacaggagaacgctataggctgaccttgtgcagcatcggagtgagccaatcagttgccaatggtgcagcagatggctcagctgaaggcggcctgtcctagctgagccaacctgcagaaactagtgtcgctttgagattttcccaatggcgcagctgccgtgcaaccctcctgatcccgtcccctggagaaactatgtcacattggagtcaccctttcgtcccatgatggataggccaggtcgccccccttgtgctgacgtcactttcattaaggttcatggtcgcgtattggctcacaatctgtcggtatctttttggagggcaattgctgggtgatacatctcctgtatttacagaattgagctgaactgacaggcattacgcgtcaacggacgcgatggggctgcctgaaagcggcagacaagaagggggtgtcttcccctccacctaaggatataagtacgacttgaatcgatgaatcgtgaccttcatccttttcccaaagcaatttggtctaccttagctcagcaataactcaagtgactcgcgacagagatcttcataatgacggcaaaccttcacactcatgcgaagagcggaactctaaatctgaagaacattgtccaattccttatccaggtagaagtcaatgacgaagatagctatggtgatacggcccttgacttggcaattcgaaacggccatgttggtgctgtaaagctgcttttgcagaacgatgcggatgccaacagagtatcttcggatggcaagacccccctctatgcggccacgcaggcaccaaacagcggtcgcattgtcgagcttctgctcaagcacggcgccaagcctgatgagccggtctcacagcagaaaggtgacaccccgttgatgtcggcaattcgactaggcactagccccgaggccatccgtgccctcatcgaggctggagcagccatggataggccaaatgaccttggagaaacgcctgcgagccttgctgaaaagtctaccaacaccgctgtctccaaggctattcgtcccaaggacgataagccagcgtggaagcctgagctagagaatcttctcgttagctccggtcttttcgccctggcatacttcaaaaacttcaaagacgtcggcataaacgccataaatcgtgttgctgcattggcggagccattgccaggcgtatgtatcttgtcatcgacattctctcatttctaaatttgcctaatcccgaaatagcaaactacgtatccccgcacggtggaagagttcaagtcaaaccttcataaattaatcaagaaaaagggtcttgaggacttctacccagagggcaatgaatacgtggccaaggtagcggagaacgcattcaagatcctgaacgattcaaccatcccgggtgcaacacccaagaatgtgaccatcatgtcccacctggcgttgtatcagcctattctatactgcggtaagccaaagtcatcacatcgcatatgaacaccatgcttatactcgttgcctctagatgatagtggctcgatggatactgacaaccgcatgagccttcaggcagccatggttgaaaatatggcacatctcatcacggcggctgctaccgaggatcaaaggcttgttcatcttcgcttcatcaataaggacgacaaatttgataatctcaaccccaacgagctttccttgaagatgaatttctccccaacaggatcgactagactgggctcgaacctgaaagataaagtcttggatgactttctctatggcccaattaacaagggctatgtgctctcgcggccccttcttatcctgaccgtcaccgatggagctccaaacagtgaagatcctgatgcatacgaaaatgaagtcagggcatctctgaactttgtgaaggccaacggatacggagacgaaggtaagctttggtcgtagttctacgtcgacgataccgctaaccctgcatagccgtccgttatgaccttagccaggtgggcaacgcgcctgaggctactgcatttttggaaagctgggagatgaatgatcttgtccccaacaggatcaacgtgactgctggtaagtgataactgaagtaaattagaagtaacatggatcagtctaactttcaaatacagaacatttggatgcccagttcgagaacttgagagacaaccaggctgatctcaataattgggtacgtcttcccgggtgttctattggattttgacgcactactgacgagttcattttagctcctggagagactcgaagagctggtcaattattagatagtgtcttgcagatggaaatgaaaggtctcttgactctcattgcgatttttgtattcattgcaggaaatttgaaaaagaaaaagtatccaatctccccaacaactaggagtgaagcaatatgcggccacaactagatatataccggagcgagttgaataagtggtacttagaagcaacaatgaataattaagtaaaaagaatgactgagtctgttcaagctagacagtgtgccacggactagaactgcttcgtcgagatatcacactgttggtggctagctggggtgggtccgtagatctgaactttaactacctactccgtacctatccttgcgtcaagaacaggagaacaatatttgatctacaatgtagtatcgaagtcgaaatgcgatagcgtattctcgggggaccgttacgtcccaagtctaattaccaaggtggccgtaggctgatctcgaaaaatcgatatgacactatcattttcaccagattgtggaggtggagtactacttcacatacatgggaccatggattcgaggtgccttccaggccacagttcaacccaagctcattccttcaattgtggcaatcttccatccttcgttggtgtcatattgctgatctagctcgagcagcaagtccagcagggctattcaacagattagtatcaagccgaaggataattggagtggacacatacttcatcatcgacgtcgagctgtgtagacacccaaccgccctggcagggataagggtcatcacggcaggtagtcaggcaggtagggtcatcatcggaagtggcatccttggcccaagcactagagacagccaacgcgagagtggcaaataggaaggttgagaactgcatcgtgacgggttgtttaaggtcaaaattgttttggtcaagtaggagaagatgtaagtagacaaggtaatggagtgagtcgtgactgtagaggttatttatatgagcttcatatccatcctccagcttcagctgtgctgtaatttctctagccatagatgcatgatgtataagacttagctattgagaaatgtgggccagcgctagcaacattctccaataaaccgtatgctttccacgtaaggaactggggccttttttcagtgtagctgaatatttggacaaggtcggtcaataaaaacttaaaggtgcattgcataggtctctatatcgctctcgactgattggtcctaccaagatgcacgataaatagatctacggctcaagttgcaccgcatgtaggtatgatgacgatcgaatgctgcaaggtcgcctcttgccccattccgttcacggtggaccgttccgtgccgtgcaaccctttttctttcatttttagggccctgcacagcactggggtaccctcgtcattgaaaattctacgcaaggtttggggccactccgttctgcgttctactacacccttgatgttggggatcgccatgaaaatccatggttatactacatagaaaaaccacaaacttaatccttttggcttttaccgcggcgtaccccggaaggaagggaagatatccataaaatatacatttaagaagatcaccgaagtgactaaaatgactaccgaaattacatgacatgacacggccggcttactatacttgtgattcataatttcggaagcgatcatcaccacatatttcaacccacatcttataccagtggtatccacggttctagatgggcaaaacccttagacataaccgcatgcgcgtgtcagttacccacacagtactcggatcaatgtccaacaatagaaatctcttagtagaatgccgtaacaacatagtttggtctcgaccgaggaaaaccgggctagtacttgtgtatagagtttcttctttgctgttaccggaatatgatcaagtttaatgctcaagtgaaggagaagaatggcgtaatcaggtcatgttccaaggtttgctaactacatagttaccgacagagcacccaactatctaccagcaaaggttaaaggccaaaaaaatcccagcagcacagcatatcattgtcaagtggacgtatgtggacaaactaatgtacccgcttatttgcaaagagtgtcctgcattccagaaatggaaggagcgaagaagtactcaccaccgcgagggatgacccagcgttcgatgggaatgtagtgcttgttcggggttggcacgggcttctcaacatcgggaaagtttgcaacaggggctgggtgctcgtatttggtaacatcgtcctccgcgcggtagtcgggaggcatttggccgatgatagcgtcgataccctggggcgcgatatttcccatcttggcagtgaaatcaacaggtttatcctccttgtttgcccattctgcagagctgttagtcctcaacgtggttgtaaatttagcgagaatacagacctttctggacaaatcggaatccgttggtgatgctgctctggtaggaaacaaacaacagaccacgatcatgctgggacacaccgccggccttctcattgttcagtgtcagtggtccgtagggaattccccgtcgcaacataagatgcttctcgtaattggggaagtcatctcgaggcccacacttccggatgtgggcagcgtaaggacatttggtttggtcctcagggttgtaagtgaaggcatccgtgtgatttatctgttccagctttttaaattccgcttcggggtctttattctcctttttccactgtgtgaacaacttcttcttgttctcgataggatcggggttcaacataggcgatggatcttggtctgggtaaagttcaagcggggctcctgtacatatcaaataagtgaatgctgcaagtaaaggaatacacagcaagcagacgatcttaccgttgggccatcgtccaacaacacgggaggagaatttgcgaagctctgctgcagatcgttcgttaatgccctcagcgaccactttcttagtgttgcgggcacaccaactgaaagtgacatgttaagaatattgtagcagaagaaagccaaagaggacacgtacgcgacgaactcgggtgttctctgttcgtatgtgcggaacaccatgaagcttccctcgttggcccaagctgggtgattcccttgatcgccttcgcctccaacaagaatagcactaaagaggtcgtcagcgactaaattcactgacacttggtgtaaaaagtctagagcttacccagcctgaattggcttcaaacccttcttggcttcttcgacctttgcatcggtgtctagaccaatgacaactggctgggagataccatcaacccatccaaagctaaaccgtagatgttagtcttgcaggatttatgcaatgcgcctgaagtatcatactgttctctgtcatcatcaaggacatgtccctgctgccggaagacaagttggatacttggctttggcttgtcgacctcgagaccaacttcgaaagtctgctcaaccattttgatggtatcgactaatgtcttctcactttcaccggttatagtgaagacaccgtcgaggtatccagatcgtggggtgaattggtggaaccaatcatgctggtcatcgagaccgttatgctttttcttgtcatctccctcaagggggtaggtcatatcctcccactggccgttgttgaagacatcatcggtgaatgcctcggctccaagctggcatggtttagcacgctcttataatcaccgggtagtctcataactcacctttgctagacctttggcagagaaggcaacattgatggcagacatatggacgagacctttgagagtaccctcttccttcttctggtagattccttttctgaatctctcagcatcgcgggcagtcgtcagattaggaataagggcggccaagtgtttcttgaacagctcagggttagtgatgcggaagaagacaaaaagctcgtgcttcttggacagacggggcctggaattattagaatcaaatccgaaactggaataccaagaagggtattgacttaccagatgtctccctggatgttcttcttgttggggggtgccattttaacgactaggtcaattgtttccagttgcagtcgttctaggaaaagacttttgaggggtgaaggggcgagggatatgcagagctttcttataattttagctacaccatacaatggctaatgcttggaaatcgggcgaggtcgagacgtaagagcatgccgcggccaagcatcaatgatgctgctactacatactccacgtagcatgagctgcaagcagattgttctttcgtatccatctacgacatagatagactaatcacattccgtgatgtaaggtggctgtcccgagaattactgtacaaccatgcgatacaaatcgagaatatcactgtaccagctgacattgtcccatctaccgtggctgcctgtgaaagagaccagaatgacgtgtttagatagaaggagtcgatccattccccaacggagcggtccgagtttatgtagtgctccacattgttgcaataggcatacattgatgcatcgctggagacatggaagtgagatattcgcagctttggtatggtagagatactgtacacgatcctggcatatgcagtctggatactacattatctcctctgattggaatgcgacccaaccacgtctagtgcctggagtgcactaaaaactatctggcctgaaacgtgcatctcctagctattacggtatatcacatgtacctagctagcacctatcacctttcaattattatcaattgagcaactgcagatccagatcggccaaaatcatgcagcgaatacataatgtgacttcactacgccaatcgagatctgctgattctcaccgccaccaagtgaaaatgaatcgatcgaaaagtaaaaagataaatgcagacacatagcgggtctcggtgtagctactggatatgaacatgaagaaatatagaactgaaaataggtaataaagttcaatgacgcctaaaaaagtgagaattatctacgcctagagctagaagatacctagtagatttgccctgcaagatactgatcgacaaccgtatcggtgctgagaaactatgccagatactcaccgtaaatctctcccggaggatcaaatttgatcaactcacggtcgaggtactggattggacgagtcgagtcgggtcaggctggcgcatgatacagttgaatgaaaagagctggagagtagttggtggccttgggccgatagttaggcattctaggtatctaatactcgatagacgaaaagagcaaatagtaaccaggcaaaccacttagttactcacccataaacatggtcaaagctatatcaccaagacagcgggatctgatacttctcccaattaccaggagtatcagcgtccctgaacttctcaattccaccagcaaccccattctcatccacttcccaatctcccatttcaaccctctctgcccaattcaacagcaccttgtaaagctgagcaccatgagtttctcgaatcccattccaaccacagacttgataaagtttatgaggataatctatcagtttatgactggcatataatccaatctgctccctaatagtatctcgggcgtatcctatagacccgatgcgactggtaagaagcagtctggacatattcccggagtcctgcattctgcccttgttaatttcttccgtgtataaaccagcagggatatcaatattatccaaagcccggccccagggtgatagattggacccatctgctcggactaggagaaatggcatttcttcgtcgttagcctcatcgtcattttcatccggttcaccttgacctatagtacgacaggctacaaagggctgggttttcaattcagcaacagactgtatccgggttcccggagcaatgtagcggaaatgaatctggcgcacaggaagcgcggagcaaaagcttcatcaagtaccgactctagaaattagacatcgacccgggctaattgaaccgggagtagagtttcaattgacgtgagtgaacgcagcaatggatttatcgatatcccgcagcgtatattgacaatactcctatgggaaactggagtaagtggtcgctgatttgtagcccactcagaaaataaaaaaagtgaaagccaggatcctcgtgtgaccatcccctcgatggagtggatctagctgaacgaagagactgggcgggtttaggagttaagcacgagtcaaggctgactggggggtattcttcccatcatgtcgtggatgggagcggagaaatgaccggcgccggtccatgcatattgcagaatttgattgtgaagctcggcggatcgctgagggtcgaaagtggactcggacatagaaggactagctcagggggaaagcaattgcagcgtatgttgtcaaagcgaaaacaaatccgagatttgggtggattgccttagcgtctttcggggtctgatctcgctcattctagaggataagtcagggctcaaaccccatgcgtgatgtaacaagtttgggtatggagttatatggcatggaataaattgcttcaggtagctgactgaatataaagcagaattatagtttagttgcattcagttgcatgtcttgggcagtacttaggagaccaaaggggaaggaggataatggccgaggtctgcggaggagtagacggtgtcggtttagaccgtattgaagggtctgtatccgctcttctacatatatatcgccaaaaagaaatttaaatgcccttgcacagctagtagtcttctcccagcgcatttgaaataataaaccagtccgttcttcaatagtcaaagaacggagtgaacagcaggataagagttgaaatgaggtgtgttgatgagtaattcggagcatccgacgctgacaaagctggcaaggaccaccaatcaccggttgcaaaccccgatttcggggtttcggtatccgtttttgtgtgggagccgcgtttgtcgcaggatttgttgcaaggtcgagagaaaggagggattgggtaatagttgcatgattcatgaggcgggattcgtgattcctgcagcattcatctcataccatacaatgttggaggctataatatctacaaggaccgatcatcgtggagttgcctaattggaaaatgggaacgtggaaccgaggattagactcggcaggctccgatggtcggccttcgatcgactcgtttcgataacattgtagaccagatttgcagagggtgtgggaaggaataatagggtaggatgagctggacgagaaaggcaatgtacaggtataagtagggaatattcacaagcgacacgagatccttagtatccgaatcgggaggcgaatgaaggcaaaacggaggcaaacccgagggattaatcatcatccacccctccggcccccgggcttccccccactgaagattcaaagaaaaaaacccacttgtggccccgacttctctctccttctctctctccggattccatcttacaacatcgccaaaatcacgattcccacgaatcgaacccaagtcacctcgcaacaggttcgacatcaatcgcatccgcgacaaatccgcaccgagccgcattcggcatttgagtcacgtctctcccgtccgcgcaacgcgcattttcaccgtccatcggcatcgagaaaatcggtttccggctcctgccttaattgatcctacgggtaaacgggaaagccttcataatggccaactacaatgggcgtcgcatgcccaacttctcgcaatacctcgatgacttgaacgcaattccatcgccgtatgaccaggcccagcagcagcaacagcagcagactaccttcaacgacgaggacctagctctgttcaccaacaccgagttcttcgagttcgacaagttcaccgacttcaacggtctaccttcgttctcggcagaagatgacaagacacacgaggctgtctccgatcaatctgcgcagaatgtggatctgaagttcttggatttcttgaatggtaagtgtggctgatttcggtttctgtttttcgcatcgctggttggttagtcctgagtctcagctgcatggctttcccctgatcacaccatactccgcggacttgttcacaattgtgtctattggaccaatgtctacaacatgcatattgtttcattggttgcctcatgaattcgtcattcatgcctattgcacgagtccatcgttttggggtcgttttggcatttatggcggttcatgcgcttcctaccctcaatatcatcccacatccttccacagctttgacctccttggctggatttttgaaccctgcatatcatccttcccgtggccctagcagggttttcttccactcaaatttgactttggtcgttggcgttaatgctctccgctattacgccattccacgtgatacaaacccctgctcagactctaactactgctcggacccccactactcttcgggaaatcgaaacccgcgatgtggatgttttgaaattgaatcaatgctaacggctttacagcagagggtctcaatggcattaccgatttccagcccgacctgactggctccaacgtccaggtgcccatgcacaatgcccacttccctgcggttccgtccgttcctagtgggcctgtggctgcgagccaggcacccctgcagcctgcgcctattcacaccgctccgaaggtcgctcaaactccatcctctgtttctatgtcgccttccactccggttaccggcaccaagcgcaagaactcagcacactcgagccaggagagtgctgaggaggctagtcgccaaatggccgaggaggataagcgccgtcgcaacaccgccgccagtgctcgcttccgtgtgaagaagaagcagcgtgaggctgctctcgagcagaccgtcaaagagaccaccgacaagaacgacattcttgaggcccgcgtgtctcagctcgagctggagaaccactggctccgtggtctgatcatggagaagaatggtgccgacgagcagtctgagcaagacatctcgaacatgttcaagaagttcttggcctcacagaaggccgatgaatcaagtatttccgacctgaagcgcggtgtgggcactaccgtatgaaccattgcctaatattaaaagaggaagaaaaaaaaccggcaaaaataaaaaaaaaaagaaaccccagtcttatttgattgccctgctactctactctgctgcttcaggtggtgaatgtcctgggcttttgcttgttagctccatctcaccatctttgccttcttgttcatagtgttctttttccagcgatgttgttttccttgtttctagcagccagagctacttcagattttatctgcaggcccagggggtggtgggtggatgagtgatgtctctcatgcagttacaagaattctagatgcaagttttcatgtctttcagctcggtttacgcctgtccgacttgcgtagattatccgttttaactaaacaccaaataacctttgcttcaatctacatacttaaatgtttccaccctcgaccggcctcgctcggcaatggtaccgactggccgctatacaccttcgtaaacggactgatccacccagcaagctccacaacacccggctctgcaaattcgacaaaaaggcgtggatcatctactcccatcccccgatatatccagaaatgctagaattcctgaaacgcaccctacgcaaatctcgcggaaacgtgtacggtctagaccatgcggtcctcaacatacagctcccacagcagagtatgtggatgaacatgggctactgggaagtgagtccactcaattaaataattgtctggtttgaatccacattgacccgcttactagtatacaaatgacttcccagaagcctgccaagcgcttctagaccaggtcctcacagctgcgctaacaacggagaaggcatctgccgtgagcatcgtggatgtcgggtgtgggtgtggtgatcagtcgttatacatggcgaagtttttcaattgctcttcttctacagcccagtccgatcctgaaactgggactaggacagcaacctctgccccaagctccagtacccagtcagacatccaagcatcagagtcaggcctgcggtctcgccatagcaagaccaagccgcaatccccctctcagccacgcctagattcctatatcgggatcacgctggaacccgcacaggccgcgctcggctcacgtcgtatccatgatctgcagcgaaagagtgaaagctctttccaggcagatatcttctgcgcagacgccgcagtacccagctcttggactggggatttgaagaaatcaatcacggcgcttgaggacgcgtccagtaaccaaaatgaaaatgacaatgataacacgtctacatggctcctggccctagacacattctatcacttccgcccctcgcgtctccctctcctaggctatgcacacgacaacctcaatgcctcgttcatggcttttgacttgatactatctgacagtataacctggtacgaaagtatcctcctccgattggtgtgctggggcacgaactcgccgtttgggaattttgtttgcgagaaggaatatgtggagctacttgttacggctgggtataatcctgcttctgttcagatccgggatatctcgcagcacacttttggggggttggcggatttcattaagcgcagggctgaggaggcgaggccgtttgggatcaagctggggaagttccgtgcggcgagttttgtttttgcgtggtgggctaagaggagggttgttaggggtgttgttgttgttgcgaggaggtaatgaggggttggatggtgggtatgttgtcttgtgtagcagtattgtgagccgctatcgagaggagggtgttcggtattcatctaggcagcctttacttcaaaagtgtatgcctatcgatctacaaggcaagctaagttgtacatatcatgaaaaccaaacaatatcaatggctctgatatctacaagcttatatgttacataacctatattacagtaatactagggacctcgaccgtctaaggccttcagatagttgttgcagagcgaagcgactgattccaactcctaatgctacgcaaagcccccctcttactggcttattctccccctgcctataatttcagtaccgccttcacaattaggcatatttcctgccatgtggtagtagtaagacagtaggtacctacaacttatatataaaccactgataaaattaagtcccctttgtgatatcattattaactgcttgatcaactgctttatcgtcaactacttaagtgaccactttagcaaccgcttgaaaaaatgcttgagaaactgctttagtaactaatctatgaaaagacatgcacacaaggttatttaattgcttcgcttcgctccgcaatcatgtgactttccaatcctttttctcccaaataggcttaggccaggtactctaattcccttttccccacatagaacggggcccgtagtatgtatacaccttcccgaatgaactcattgttgattctcatcagattttcttagtctattgtctggtacaagctttgactattgaaccccggaaacatggatctgtccgagagatatccaccaagtatgctattggctgaagtcgccaagaagctgcacgatcatcacagtgaacttcgcgtctcccttacctccaatcacccgctgtgcgtagaagctctcgctgcaagtctggattgtgtgtatggcattccggaacgcattttctaccaaccacgaatccacaccgacgtgcagctttacgacaaagtgccctcgaaaatatcagtttggagaacaacccccccacagcattaagccgacgtattcgaaccacgggcaggctcgaatacgcaggttttccagagccgctctctcgcgaacaccatgccgcgttgaagaagaaggccgaaaacatgcctccaccgcgagcttctgttctcgaaatccgcgctttgcgcacagagaatacgcccgtatctattgtcgagaactcaacaatcagtgctgtcgattgggatgtgggtatgccgcaatgccacctcgatggagttgaaatgatctgggacactggtgctaccgccactatcatcacgaagatatctgaagtcaagatttccaagcccatctgtcagattcaatccatatgccgtacaccaattcgagcggcactcgcgtccagctttccttcgccgtcgagtttaccaacacgctttttacaatgaccgtgatcgcatgggtcgtggataaagaagcaatcccaaatttccggtcaggcatgatcctgggacaaagggattgcatcgatgccatccagtatagatctatcccgcgatcaattcttgaggccagaggggagtcggttgatgaaaagttctggggggatctcattctagagagctatgttgattttgacggaagcttaaaggagatcgtttagctttgcttgtcctgtattctgattttcctgccctgacgtcgctttctttatcaaagacaccgagagattttcatgtattattagccttcaagacatcgacctcgggtaaggaagacacttcgggagtttcatgtattattaaccttcaagatccatggatttataactatgggctgagtgtgctttctatctcccttttctgtatgttagaaaagctcatatgctggggaggagactcgttgtgcccattctctctggaaaggtcttgctaggtccggtataaaagtctgctttaatgctacaatatctcaagtatacttctataagcggtatagtttcgtgatcggcgtcccttgtgttgttatcactcatcctagtatcccgagtatcatacaatggctccattgtatcgctgttcaggcaaacgcctcccagcaagttgttagccctgctgaacacgcaaaattagcgagcgcagtacatgccacgttacaaaccgaattaagagccttcagcacactgcctagaggctaagctcgcagtctcgagtgtcaggtgaagtataaacggtacaccgatggattaggcagcttcgacgctttctacgccgtagttactctagagtctgttctccccagcagagttcttgtctaagtatgataagaatgagtaagtatgtcaaaagtctcctggatcgatcattgcgcatattcgcctcgctctctatccgcagtgctttctgcggcaaggccgtgcctattctttgacagattgtgtatgtttgaaaataaagctattcatatagtataaaactgtagcttgccccattctagatattcccactatatttatctaagtctaggtggtttgaagatgttccgaccgtacaagtctgtatgtttcttaacattgaaggcactcctaccatataaatctgtattcggatttgtatgttttttgatattgagctattcacaatgaaccgtgctcactagcgcattcaacaaattgcacccaggagccccacaggaccccctagtcttcctacgttgtacaccagcagcttgtagaatattccaagcgccagtgatgtggagacctaacgacactacatggcgcgctgatgtatctaaatgatacttcggatgaagttcttggcaggcaagcaatctccagaatcttctattcaattctcaggggaagttcaatttagtgaaaagaagttagccaaagaatgttgggtaccatcgggcgcaattgtcagtcctggcgttatgactcttatgagctctaggtttcagaaaatcgcttgttgcgtaatgacttgtatgaccctgctcttgaaaggggaaaattcctcgggtttggacgttgtggaaggttatatacaacaaagaagacgattctaaatgaattcagcaagaatggccgctccaatatcatcaacaactctcctaatcgctttcttttcagtctatatttctatattatagggacctcgggagtgggaagtggatattttatagtactagcttgtgggtttgtgggtcgccatagatgcccaacctccactcctgccctggaggatacagtttacaccaagggtatgtgctgcttttgggtgaagaaacttcgctctactatccgaggcctagtccggactctatactagattataaggtctttctaggccaaagcacatgcaagccacccgagcccgtggcggcctgactcatgatgacgtaaagaggcggtgactggcaccacctgatatctgggcacatgactcaagggggattcatttctgagaaggaatgttgtatacttgctcattcttattggcagtcaatctaaattataatccagctcactgtatcgtctttgttcattgctaattgctaattgctgagtagtctgactggccttccaagaatgctcaatatgtttcaggcaactagttcggcagttatccaaggctgaagccgctaagtggtgggtctagacgatcacatttgctttcggcgctcctttcttttggtttttttttttcgggcttgtttttataaacaaatcgcccgcgcttgatggcgaaaaaagcttttcccctatatattccaggcacctgatacttttctggtctgacagtcccaacagggaaaaagatactgcagccaagaagatctacaagatcgtccagattatacccgtgaagcggtcacccttggcaatatggatgatcagctgcctgtgattgaatcgcatctatcaagcgaaaagccacggacctcggctgagatagagagacggatcacatcaaactctatcggatcgtcgactggctcaagcagctcctttgaatatgacccacagattcataggctgcaatcgcggaatacagagctggacttggaacgccatcgcactggcacgtcgcgagcattgagcaggactgagacgcaacgcgctcaacatgcgctcactgtgggcgagagtcttcgatcgcgaccatcacggactccattgccagctttcggtggaggcaagccctaccctccacctctccctgaacgggaggattacgttgtggagtttgatgggccagatgacccattatacccactgaactggtctgtgaaaaagaagtgagtttcaccatgtctataccgtactgcgtatctagcgtgcagcgttcttactaacttttgcaatccagatgttacatcagtgccatgctcgccttcaccagtatttgttccaccttcgattccgccgtttttagtgcttcatcgagtaatgtttcaaaacacttcggcgtcagtctcgaagtcgccatcctctccagctctctatacatcgtcggctacgcctcaggtcccttggtatgggctcccctatccgaactccagggccgtcgaatccccattctcatcgccatgttcggatttggcgtgttcaatatcggagtggcagtcgccaaagatttgcagacactcatgatctgccggttcttctgtggtatgttcggcagttgtcccttggcagtcgtggctgctgtattctctgatatctgggacaaccgcacccgtggtgttgccattgccatattctcctcaacggtgttcctgggccctctcgtggcacctttcatcggaggcttcattaacatgtcatatctcggctggcgctggaccgcctatatccccgcgattatgggcttttccgctttcatcatgaatcttttcttcctgagggagtcatacccacctgttgtgcttgtggctaaggccgcggagctacgtcgtcggactaagaactggggaattcatgcaaagcaagaggagatcgaggtcgatcttcgcgacctgatcgtgaacaacttctctcgcccgcttcgactgctgattaacgaacccttgatcctagcggtcactgtctacctgagttttatctacggattgctctactgcttcttgaccgcctatactctggtcttccagggtgtttacgggatgaacgccggtgttggaggtctcccactcttcggcatggtggtgggcctgttcaccgccgcggcgtacatcataatctcgagcaaggcctacaataagaaactcgaaatgaacggtggtgtccccattcccgagtggcgtctcccgcctgtaatactcggcggtggtctcttcgctgctgggctcttctggtttgggtgggctggctttagtggtaacgtccactggatcgtacccaccttgagtggcctgtttactggatttggccttctggtcatcttcatccaattgttcaactatctgattgacacatatctcatgttgtacgtcatattccccattcctctaacttgccatgggtttatctaacatactatctacagtgccgcatcagccatcgcagcaaacacattctgccgctcaatggtggcagccagcttcccgctcttctcacgccaaatgttccatggcatgggtatccagtgggccgctacgcttctcggatgtgtcgcagccgtccttgttccgattcctattggattctacttcttcggaaagagactcaggatgaagagcaagttcgcaccattttatgaagctgtccaggagggacacgcagctgaggaggccgacgagcaggcggaggagacggtgcaccagcactgaacatataattgtcttgttttttgtacacgatcatattcccactagggaaatgtaattattaaaagtcatattttagcggctatgtttttgcatgtctcaacgaagcgatcttgattcaaacatcttcacaccattcttatacttgtactaatatgatgttgtatatcgggctcttctgtcggtctgatgatcatcagatcattgctgtggcaacagggataaattcaatctaaacattttacacctttttcatagccttttctggctgaagagaatatatcactttggtccccactggatattgggttgtatgatgaaaaataggatgagaatgaatgtatgaacgcaatctggatattcataggaactctcattgacctaacttagtccagaagcaagagtatgctaaccaggaaataatctggtgcttaataaaactgccatttacgacaacgtgcagagtcgaacggagatgaacacgtgactttatacgtagtatgtgtagtatatacaaacggagtagtagaataattatacaaagagggtgcactctatctcatcaattgagctggtgtaaaagaaaaaaaaaatgggttacttctctttgattgagcgtgtcatccttagtgcaggggccatgctaatcttctctgtatattttcatttgaccatatgccccgaannnnnnnnnnnnnnnnnnnnnnnnnnnnnnnnnnnnnnnnnnnnnnnnnnnnnnnnnnnnnnnnnnnnnnnnnnnnnnnnnnnnnnnnnnnnnnnnnnnnnnnnnnnnnnnnnnnnnnnnnnnnnnnnnnnnnnnnnnggtagcttctctttgattgagcgtgtcatccttagtgcaggggccatgctaatcttctctgtatattttcttttcaccgtatgccccgaagggcgaaaggacatccttatagttcaatataaccccacttttctgcgtagagataccgccttcttgattaggtgaatggtattgaagtggcagaaccagaccgcctaggaggtttgtgccactatatttgtgccttccagtcccccccaccgccttcgggttgggggtgcaccacaccgtaaacccaattcacaccgtaagcccaattttgaagccattcatattaattactatctttcaccctaagtatctacccaaaaagattcccctccctgttgcgaagctaccatactatgtgataatgtagaattctccctactaggcgacttgggtggcggtcagccgtacaatcttgtccactgtttatccaacttcttcctctcttgtaaagcttctttctctctcctggtcttaattgatcgattggcatcttttgtactgagtataccagagtctgcgatctcaggaatctctctcttagtgatttttcgtttccgaggggcctgtgtctcccttatacaactgacggtatcgcttattatcgtaagcccttcgctatatgtttataatagtagaacgcacattataggcctcgttagagcttcggtataaaggtatctataccgaatagcttcgaaagctctttttgattcttctctaggttttaggtactctttagaggggtactttctatactagaagaagagatatatagaggaagactgtagcctatataagatcaccgagaaggtaggatattcctatcgccttaaactccccgaatcgatcaaggtatacctaatattctatctaagcaaactctaaagagcagcaatcactaaaccattacttagacaataccccgacctactgttgcgtgccagattccttttaacaaaagaagtgcatttctaatcgaatatcaagtatggaaaaggaaaagaaaagaaacaaacgtgaaaataacaaatgggcttttatacccctttagggacaaagccctattctcgtttcccctagaaggaaggtacgactgcctgcgcaaacgaccaacagtataatcctaaacgggaaagtacgagtcctataagtgctaattgtaatataacccctaggtaagaatacatttagtccctaaatactagcttctcgttatccacatggttgtctaatatccgattatcttacgcggcctcaatctattcttataggcgtatcggcggcctaggcttcgctagataggtattatagaattccttaatcatctccggagcattcttaaagttacctactaggtactatacgggatctaggttatatcctaaccactatatacagtactgcagcttcctataatactttcttatatctaggatctttttaacttcctacttattagtctaccctacctatattagaggtagtagatctatatattatcttataagtagttctatacttactaccttttatagcttacttaatttaaatattaggtagatattaattaactatagtaggtctaatttatatatattcctaacctttttaataatcttataaggtctactagtagtataggagagtttttaacttagatagtcctatagctaatcctttatagtaataaaaactaggttactaatactaaagtcctctttataacgataacggttagcctattatacctatagttcctatgactttataatctatttatatatatcttcctagatctattataactttaagagtcgatctaccgcttcttatttattatatattagtcttatatagttctaattaaaagatattgctggtttataaccctatttaacaaagaaaggggacctctttattatatcctacggaagaattaatactataaaatctactattagtaggtattctaactagttatcctagttatatttaatatatagtcttaattactatactataaactaatttataatttcgctctagctatctatttataggtggtatatagtagatagtttctacttaatccctaggattttatagaactctatctaaaacttagagataaactatcccctttagtctaatataatagtttcggggattcctataatctatataatattatctataaatagatacactatctactttatattagtatctttataatagggaattaatatcggtctcttacttagttaattaataataataaatactatatcccagacgggaaagtacgagtcccgcaagtgccaatcgtgacacctactaccactactcaggattagtaaaactaacgagtaggaagtcgataagattcttatcgctaggatatactatcaaaaactacaataccgcgttcagtggctaggacacgacctagacttacaatagttttctgtaagtaacttcaagaatactcccaagaagatcaagccttccataaccaatacctacagaagcctagactaccgatacaattataagaatagaccaataatataaataaagatagattcttagacgaccacgttaacgatgataaacccacatttagggactaaatgcattcttagccgggagttatataacgatctaggaaggatcgtacttgccaaacggagcaggaacgactatgcccctataccttcccaagtagtttctcttttttcctttcttcttcgtacttagaatttggtctgaattgcactcttttctcctgaatcgaattggctcgtaacactggattttggtccttatatatgtgcataaggtcaaaaccatcagacagcgtcatatcggacgcttgccggaatgcagccttaagggtatcatccgataaagttgatgcgagccactcaccatattctttaacggctaagtctccgaacccgggaatcttcaatggacctatctccttcgagccgctttggttagcggctgcattggaagccgtcacatccaatccaggtaggtgagactagagagcaataatattgataggtagatacagcgaaccgtctctaggaatataactggtctttcggttggttttctctgtcgctactactcttagatataaagcttgtctcagattgcattggggacatctttatacatctctagaagaccgcctttctcggcgtaggtatccaatcgcttaagggtttgcgtacacaatggataatgcttttttaccactggatccacctagtagtaagggccgaggtagtatatagctaaatcacattttatcatatcatagacgtaacgccaaactacttgctgtctacttatatgttcttcggtatctagttatacgtctcgattatcgagtattctccttatcacagataattttcctcttctcccctttctacccagcggacagagaaatgtgatcttctatatagctaaaatatatctttataagtcttttgccacaggagaagcgactagaccacgtctagagttgtttctcgattggtatccagactatatcagttttattaaaacgtttagttagatcacgctgagaacgactattgaccgatacaataatcgccgtattatcgaccctgatcctcttattataagaaactttctcccgaagggctttctatagcttctcttccagcactaaacgtcagtatatgctcggggctaatactaggtcttcttcggtgtccttcaccacagccttattgttcagcgtgacccgcaattctatgaagtagtgaatacagcttagcgggtccttgtcatagatcttatctttctcctactcagattcctaaagaaatggtaaggtattcggtcgagatcggcatgcgagattgagctcatcgtcgagaaggatagataggaagggactacaagcggatcttgtagcataagggcttcggaagtatcccggagtaggagcatacaatgaaagcgtactggcccagctccgtaccggcatggcaagactcaatggatatctctttcgaatcaatgccgtcgagacaggtcaatatacatgtggacaagcgagagagaccgtagaccaatttctatttctatttcgatgttggaagtagaccgcccaccggaaggaaatgctgcaatgcacccacactcaccgaagtaatacgtccttcttcttaggagggaagccaccctccgatgatcaaaagtggaaaccgaatttggaagcagtgcgagcctcaatacgatttgcgattgctacggccgacttgaggccacttaacctagccaacgaatgcggttagaatacccccccacctactagccctaaaaccatgtgacaaacggtagacgcgcttcaactgccgaggataggatgttgaacacttgaagaagcgccttcaagccactctactaagtaatactaacccatagggtccaactatgagaagtcaatgccgaaggaaatactgtatgggctccaatgagacacggcgcatgcctaaacatgcatgtactggtagattagtgatagttgcctttcggcccagccgtcgggcattaatgaattgtgtgtgtgtgtgtgtgtgtgtacataatgggaacgttgtaacgcaccccagttcagaaatttgacaaaaccgttagagatgatgtccttaatgtatgtcttttgaccaccgcccttgcacccatcccacagaaagatacacgctcaggaggtacatcctggtaaacagctttaaatggcgtgattcaagttttttttttttttcaagcttattaggggtactcccatgattcaatggaagatgagacatacaagaaccgtttgatcctagcttgaagagtccttcaatgatatctcgtcgattgtcatttagacttgctttgctgtagaaaagcagtgcatcgcgataaagttcaggggagccttgcgcatatccttgagcgtcttccataatcatgtcgtaaacactagtttcgtgtaatacatatggtctatcgccattgtcgcgtagatctgtgtatataccgtctttggctcgtccatctatatggtatcgcgcgtagattgcatctccatagcgcttctcagaaatcgctatgcagtagcgagatgcccatggttcgaccattcgtattctcgccgttttattcatgacgtctgcgacgggaagatcgagaaacagctgttcaggtagggaagattccatgtttgcaatatcgtactttatagtcgctggtaggctttggaaaatagattcttgcgtcaaaatttcgctgtgtagcagacagtgcaagtatttgggggaataagtctaatgctacaggctcagccgagctatttgcgtggatgccgaaggattgtctgctaagtggggtcattacgtggatttacacgtgcgagagcactggagagatccataccagttggaataccttcaataactatcactactaatgcacggggaatcaaaagcggcgccaccttcatcctactcaccctggcgacacccaccgaactattggccgagcttgagccgtgagttagttgggtggatgaccaccagcaaatctccactgttgtatgtttttgtttttgttttatttagcttaagaatttaattcccacatagtatgtctatcattgcactgctaaaggacgttggccatgcgtcttgtatctatgagactttcgacatatgttgtagaatagactagagatgaataagctcatattttgacaatactgttggcttacagagctagttctgaatctaacagaacttgctcggactatttaccggtaacacgaagctttgagagccgtgctcggtgttttaacacatgtcaaacgacactcccctacataatgcaactgtgacatttaacgaagatcaggtaacaatatatctgacttattccaaccattatggcctgaacatatccgttgagaatgggcatcaaatacataaacataatgtgttttatgtaagaatagaatccattaattaacactgatctacgacccatagcccgggttctcagttttgtgagcatagagaagaagtcacgaagactatactttcgaattaagtaacacacgcagcaaaagacggccgtctcagtcccacataccatgtcgatttcgcgatataaggcctatcaattttgtatccttctctctcatctatgttgtcgactgtcacttcatgtggctctgtacacatgctcgcctttcttcttttaggttagaaccccttgagctctgcgcgcggcacatatatattaagttctgaccctctatcaggggttctcggctctttctacgatcatgtcaaggccgggacccagcccgcctgctgctctggtgtatgcacagatctcgataacgatgtcgccagctgtcatgcatgtaacataactgtgagtgaattcctattttaactagagtatataacattggaagtcgaccttctgacacaaatcttacttgatagtgcactagcgaagcaccaacctgctgctccgcaacctgcaccaacacagccattgacccggacacctgcggcctatgcggtagcaaatgcacaggcaccaaccccgcctgctgtaacgggatatgtacggatcttagcacagatcccgcccactgtggaccatgcttagcaagctcgtgtactggtgttaatccagcttgctgttcggggacatgtgtcgatcttaattccgacactaatcactgcagctcatgttcggctttgccgtgtggtggagcacagcctggctgttgctttgggcagtgtacagacctatttaccagtttgcagcattgtggatcttgcactgctgcgccatgtcctggcttgctaccggcttgctgtgatggagcgtgtactgatttaacgactgatgcgaaacattgcggatcgtgcagtacagctgtatgtgctccccccccttcattggatgggcatactaactggtgtttcctttgatagtgcaatctagggccgggaggtggaggctgcgttggaggtaattgtattagttgtcctacgaaccagcctttctgtcaatcgtcgaacacatgtgtaagtttccaactatgccattgtagaactctgaactaattccaaaaatcagtgcccgggtggcttcacgtgtatcaataatggtcctctgcctggatgctgtgggccattgaatgtctgtccgccattatcgaattatctcggtgattccatatgtgtgagtgatgcactagactccactgatagactttctgaccagggtaagatagtgtccgttgccatgtactcttatcatcgcgcaactggtttgtataggattctaaggtgaaccttgtggtcaattcgaggtggaaagagacggcgagaaaagcggatctgaataaatggcctgcaaaccacagactgtagcagattagtatagcttggcaaaagttggatgttcgagatgagtttattcatattgtacatgctatgtatgatgcgctgcaggtatattaacatttatgaatgcccgaaatgaatatgcaaaaaaagtctcgttacgttcttgaccggtcgttataaagaagagtctttcatccagggcacctcgacatcaagggcgtttgcgacccttgtcgcggaagcgagacatccctcaagcagtaccatcccgtcccagcaccaaccaccaacgagccagacatttccatctccattccgccaaaattggctcttgtcatccccaaacttcttctggctgaaaatctcattgatgatttgtctgctggtggacgatcgcaagacacgagtgaatgtggcagtgtaaaagaccttatcggggtcaatcggagaaatgggataagtcgtaataagagcggctgacggatgttcatggatcgtctccgtcgctgtagcatttgagcacatgtggagtgggtgaggtggtgattcgccgcgattcaaggaaacttgcgaccagagggatttgctagaatcaccaatcccggaaaagtcacggtgcacaacggattgaacggtcgtagtggggacggccttcattgcgcttcggagaggctggaaaatcgcgccaaccacatcaggcgtcacagccagaatgacatggtcaaatagccgtgagctgctctggccatcctgggtatttgtccagctcacttgaacttttgtgccgatgttctcgactgccgtaaccttcgcgccaagtttatacgtcaagtcttcggacagcttctgctcgacatgctggactccaccaagaacagtgtagtggttcttacggaacgttcgtctcccataaccgaccagatcaagagccgggaaatccattaactcgtcgtgtgagcaagtcgcaacgctcgcgaagaccggcaggaagtagtgcttcacgtagtaactgggcaacataatcctatccaaatattgacgcagagactcctccgtgccagacgactccagagtcttgggcgctacaaagaaacagcagactttgaaccaataatagcatattgccaggtagcaaatctcgagcagccacccggtccatgataagccctccgggcgcaggggaggtatttggtggttatttgaggaatgcatgaagtatggggaggtttgtttcgtggggttgttcggtagtgtcgacagggagtaaataaaccgtagcgagccgtatgggataccgaaataatcatacattcgcttgagactttcgtagtatccgtcggcgaatgtgcgcatgggaagatcgaggcgttgggtctttgcgcttccgccattttgggttgtgagattgtatgatgcggaatcgagcgaaagtttctcttgctgtgttttttgttgggattaactttagttcgcgcgagcgacgtcacggatgcgaaagtttgtaccttttcgaaaacttccacgtcgaatctcccttgaggatcgctcctgagcatgtatgcgaccactaacccggccattcccgtgccaactacggcaacatttttgtgtggttccttcgcctgcatggttcggaaggaaaggttggttcacagttccaagatatagagagcgtatacgtgcattcccgggattgagagagaagtcgaaggttaagggttcaagaattcgattgaaacaataattgaccatccacatgtggctttcaacatttcaacctttccctaggaggttagttaatcatgccccacattgtgtcagcaagggcctcggtataattccttgtgcattcatatccgtccaataatgcagaatatatatatcagcatatgataggccaatgccgagtacattgttcccctttcagttagtgcgaccttgaaaccactattgggttggttggttgggagtcacaaggacatgaatggcgccacgggtgataaattggcgccaagcctcggtgtttggtatgtgggaaaaggagtggctatgaaacaacttatgctgtactacagctatgttgtgtaatctcgtcgtgaagtttgtacaacgtatgttgtaggaatcaaattcttacttctatgtcgtgtgggcacctgcaggttccatacctggatgacataatcagatggctcccaatctttatcgcttatcgtcacgtgcgtgtttgttgacgcgtgattttggattttggactcgagaacttggataggcagggaaacagatcaagatatggattgagaggcatgcacctgccgttgatataaggtgttctggaacatccccaggaattgtgccactatcttgtcaactactgccatggcgcgccctaaaacagttcnnnnnnnnnnnnnnnnnnnnnnnnnnnnnnnnnnnnnnnnnnnnnnnnnnnnnnnnnnnnnnnnnnnnnnnnnnnnnnnnnnnnnnnnnnnnnnnnnnnnnnnnnnnnnnnnnnnnnnnnnnnnnnnnnnnnnnnnnnnnnnnnnnnnnnnnnnnnnnnnnnnnnnnnnnnnnnnnnnnnnnnnnnnnnnnnnnnnnnnnnnnnnnnnnnnnnnnnnnnnnnnnnnnnnnnnnnnnnnnnnnnnnnncggcgccccgacaacagccagtcttccaaataacctccgcattccctcatcgaccccgtccctcacaaaatccctgggaaagctatccagacaagcactactagatctggcatttatatggcttgacgatcgcaacatcgcctcatttccaccatacctacagactgacgaaaaagatggccccgacgatgacgaagccctcccctaccccgcggaggagacaatcgaacaagtccgccaagtatatgaagatcttcaggaccgaaagggcgcaaagcgcgaagtgctcgaacgaattctggaaggcgattggcggcatggaatcacactacgccagctggccatggcagacctccgctatatggacgatcaccccgccagccttcgatggaccgcactcgagctcagtcgcattgatacaaagcgcaaggtctccaagaaactaccgccaactgactggtccagttctgtaccgcgcatgcaaggggcaacatttgtgcaaggcctccagcgagaaatctccccattggtcaaggctcactatcacctcgcccactcggcaacattgccgctgacattcttacgtatctttgtccttgactcgccatatcaatctcctaggcaggcagccgacgtctttactgattcgtcccgagtcatctatgtcgctttcccggatagttgcccctacgtctacacttctatagcagcatccaccggatcaaagtctgctccttcgacaagctcggtggctactgatactcgaactctccagcgcctggtgcgtgattccattcccaaagctctatctcgtccgcaggaacgattctctctgcaagcgacatcactggcagcaaagaatctgcccacactcttagcccttcgcggaccgggacgatcaacggcgtcaaatggcgcctttagcatatttgcagacgcagctattgaaggaagtcctttggaccctcgaccctccaatacagtctcacctgaagagcatatccgagcgggtcattctagtctagcagaaggcaaagaaaataccgatggcttatcgaccaaacgaagatccagcggtgttgatacaggtcccctctctccggattcgaagaaacgtcgtctggccatcgattcccgattcggaacattggggtcatcactcgcccaggcaccgctggaccgtcttgatatccggctgcttgacaaaccaggctccagtgaacagcaggatgatgatattgacgactctacgtccacgcccgccgtgtcactcactttctccggctccgacgtcatcgccgggattcgcaaacttgctgagctaggcatcgttaaccctgagcgtatgccgtcgtggatgactggagaggaaggtgttagtgttgcgactgttcgactaggccaacgacttcaaaagggtatataaatgatttttttttggtgtttggattttggggagttgagaagcttggtccttctttgtttcttcggccattagggcttgatgtgatacccggacttcatatgaatgatcattttgttgcttttttatcacgtagaagacgtcctaaccgagtatagtagcgagtgaatgtagtctacacttcacatgcaaaattgtaaacatggcattcaattcatgtatccagcattaaaaagtccacctccttccagaaccttggggcacatttgcaaattcacaagataagtattcctccgatcgtataattataattgctcgccatcagagatcattggatatccgacatagctaatgtgactagtctgccattgtcctcaacgtggatatcgcaatcctttaatatgatatagtaattatctatatccacttcgacatcaccaattaggtattgctgatcgagagtcgatactggcgtcacaaccaagaccgatatacttcccggcgtcgtatttgcggtcctttgacgcatcagcgcgtatggccataagggcatcagtcgcagcattgcccttggcatcatgcgtatcgacaatagaccatgagctgctcagtaaatcccgtgacgtcatcttcctcccgattgttagccatatactccgtatattgtactcggccattatagccatggatccagcctcctcatcagtgacagccgagctttctccgacactggcagatcctggtgcctaaatagttaacctatgcaccaaatagtaatacgtagaaagtctcgaggtcgtgggtggacacacctatttgggaaagagcggctgtttgcactgtttgtttggggaagcttccctatcgctatcagctcgtggagaagaagtggactgtcttcatcaacaagatgaggctatactgcaacgcctgccattgcagttaattctttacccctttacttcttcgccctagagctgatatctgaacttattctctatgtcacgtccacgggctctgtcgggcgctgatgccccaaaggagccacatggggtctccctcaaaggtatgtaaatacaactcgaccgatagttggaccagcaagctaattatgaattgatcagtgttacggtacgttaaatcatccatattcgttgtgtcgatgccagcctctaactcttaatacgcagccttgcgcggccgtcgctttcctatcagcatcccctcccgacgtctaactctataatctccacgaaagcctcactaagctatccgtccggtgactccgatgatcaatttattttagcgcctcttgtgagacggtgaccaagcgccccaaggaaaccgtttactaacggcaatagcttactctacctccctccttcggatccgtctacgtcggagagacgttcggatgcacacttagcgcgaataatgagattcacgatgacgacaacgagagactcctcacatccgtgcgcatagtagcggaaatgcaaacaccttcgtcagtggcggcactggagctggagccgcccaacgactccgcatcaacagacggtctgaagataggcgagtcattacaaaagattgtacggtttgacttgaaggaagaaggaaatcacatactggctgtcagtgtcagctacacagagacgaagatgggctccgactcgcaagcagctagtggccgggtcaggaccttccgaaagttataccagtttgtggcacagccctgtttgagcgttcggaccaaggcgtccgaacttccgccgctcgagataaataataaatcactcggtccgtacgggaaaacgaggttgctccggtttgccctggaggcacaattggaaaacgtgggcgagggcgcggtgatagtcaaggtatgaattccccattaatcctctgcgaatgactgggttttccacgccgaaacgcggctgtacctgaaaatccggctgggccggaatgcaatgctcaacaatttggctaacgttgggggatggacagcaaacgaaactaaatcccaagccacctttccaatcaaaatcgttgaattggaacacaatgagcccagacatgtcaccctcgtctctgcctacactcaatccacgggatgttctacaggtagcatttttggtggaacaggaagagggccagaccgagggacttgaaatcctccagaaggacatgcgacgggacggtcgtgccacgctgggtcagttgtcgattgaatggcgcggcgctatgggggacaaggggttcctgacgacgggaaacctgatgagccggaaacgcacttgaaacgcggtgtgcaaccaacccatcggattatttccgccactccgccctgcatcatgatatggacgccgattgcattatgtagtgcatccagccgctggattgcatgagggcgcagcaagggcggtttgttcatatttccaatggcccacttatataatattacctttgcattggaagcagttgaaatgtcctgaattgggtgtacagtgtaatatgtcggccgtttaatataccatacaatctatgtaggcctcaccgagcaatgcctgaggctctgggatagagccgatgcgttgccgagctctctggcgccactagcacggagcggaaaccagccttgccatgcagccgacgcttaatctttgtcacacagcagccgcctttcggcaagggagctccggtgctagacactcgtctaatttggccgcccatttgctactccttgtagggcttcacaaaaaaaaaaacgggcattcgtcctcggcccaaggccacgtattctacgggatgccacatatagaaacagtacttcgggtatgtatacatacacatgtaaggtcttttagagtccagatttatcgatatggagtaggggaatggaagcatctagactctggctgatcaatggggttcagttgtttacataggcctatgttgttgcccgatctcaaagatcattatctgcaatctactccgtatgtctcgcacagacttccacgggttctattttggttttactcacgggcttttacctataaatgattttcgtcatttttttaggttgtcaatactaccttgatctgctccaccgcctcttccaacattgagtcgtattgctggctgcattaagtgcatacaaggcttgatgtacgctgacaggagtcggagtgaataaccttgcccgaaacactgggatgcaaccagttgaaaagggctatcggctgggggagcccatgtgtcacgtaacgcgggtatgggccgtgttcagggacttacaacataaatagatatgtatttcggtacactatactccgtatggattaggtctattggacttgactatggacttagtgtttgcttatattgtacttgtccacagatggtacttggatatctaattatgagagatatacatagtaatagagatgcttggcagacccaggggaatactgacaccggaacgaactgcgattaacccacatactatccatatttttatcaattggatactgtggaaactgatatacatacaacatcttccgcacttaagcgatactttctttcacccctcgatgctccacagtgtccaactgtagtattgatcatctccccgggacaagccactccacttgatgactcctgactcgaaatcctatgtcccaaagtacacatcgtgtcatgcatagaaagtacggaataagagaaacggtgggaaacgtactccgtacatgatactagttgtaggtgtggcaaaaaaataaaaataaagaagccgttgggtggactccgcaatctaaaagcacgagggaataaacggtaaagtgaaaacctacaatctcccaagaccgcggcagttcccgatggttttcaccccctgaaagtgctagttagcagtttataaaagttagatatacaaaagaatgacattgtggcgctataccaagcaaaaaacccctaaaacccctaaaaagaaagacatgttgacgccatgtttcaatagagaataaaccccagttaccccccatagatagcgtactagttagttgacgaacctggttaaaaaaaggatcagccaagacccgcttgcgttatccgctaaagctcaaccatggatcacgggcctctaacccctggggcggatgcaatatttccaaggttcgtggttctttatatcttgtaattggaagttgcctggtatctatacacaacggtaggtatcattcgggaaagaagtggaggagtaccgagggcatacatcgctgttgatatagacataagaatgaaccggtattctgggtataccccggaagtctggatcccctttagagtctagccaccctgcacatgcctgcaggtcgttacggtgtcaagactcttgtgcatggaggctagggctgtgaatggcccgggcccttgatgggcttgatttgttaaatatctggacttgacacgggtgactcttaccatttttatacagtggagtagagatgtgcatttcgaaagtcgggttctagtaacattactacacgcctacgcaaccacccgtgatcctagggggaagaagaaaagaaagtttttttttttaaaaaaaaacaacaacaacacaggaatattccaaaaggtagaaaatatatgtatttaggtagaaataatacctggaggccacaaataaaaaaaaagctaatcagaatcgaactcctttttaatacaacgttggaccttcaaaccaccccgaaattgatcttcgctctgaactgcccctccctcccgttctcccccatttttaccagcttccccctcccgaacactacatgcgctcaattcccctgcgcattcctttccctggaaatactacgatccatgtggtgacaattaaggtattaacccgctacagtccgtcgcgactctctccacaatgccaccgcctccaagcaccccggaaggcgcccccctcgccgactacttctggatagccggtgtcgatggtgcagagatcctggacacttttcagagattgggagaagattaccgtgccaacggcaccgcatcaccaggccctgcgctcgcagacaccattcaggaggacgccgatgcggaggaggaacacaacccggatgggtttacccgaccaaactcgacgctcttcaccggtgtcagtcacaggggctcttctcaacgactatcaacactttcgaagaactcagagggagcaaatggggctggcagtaacagtaaccgaagcagcatgaccgtcaagggtggctcgtcgcccctgcgtgccccaaatctgttctctgaggacttcgatttcgactccgcgctgtacaagttcgccaacgagcgggaatcttttctaaccgacttgagcttgagcgctggcgctattaccccgaatacccgcccgcgatccagggttcgcacgcagaagatcgtctccgaggattcgccctcggctggcggtaacttgctgaggtcgggtattgggagcgtgcgacgatcctttcgtgatatgaatagtatgaagcggcagccgtcgattgctcgtcagggtgagagccctccttcaaccctatttcctgttcactctaaaacggggtcgtggccgggactttctgtggatacactagctaacaatggatcgtcttcagcttcggtgcgaacttctcggcgacttagcaactacaactcggtaattcctgtcccgcaacccctcgagatatcccccacaatgcacccgttgaaacgacgattcgagcccgttctcctcgaccgataccctacacgcggcatgccggacgagatgaagctgcgcggcaatttccccgactacgttcctatgttcgcctttccgaatgatgtcaatatcgtctcctccgatcagcgaccgcgctctacctggcacggattcgccatgacaacagacaatggctccaggctgcacgccatctgtgtgcttgtctggatacccctcaacccaaatgctgcagaggagctcgagaagcgctgcgaagaatggcgaagggacaacatgacagacgaagagcgtgagctggctgcgagcttaggtgaacggttggcatcagagcgggccaaattatcccggctcctagctcagctgccgactgtccagtcagggtcagaatcccgcgaacagctcgaagatgatatcagcgctgtggaggagaaaattgggctaatgaccgatcttcttcgtccggtccggcacggcgcagcttctaagatcgagggtctgaccgatggtgatactgggttctggattccccgtgcgtacggtatcttgggccgagagagcacgatgacgagcttctggaaggaatggctcaaggccgtcgtggtgccaatgacggaaagcagtgtacagcacgtgcctccaccctcgccgcgcatgggtgtatggcagccattagagcgatatgtgatgaatctctgcacagaagcgttctgtccaatatcttcgaagactcaggtcgagattgcgattcgtgagctgcggttgtttgcacgcaaagaggcacccaatgagatcccaggttcccggaatgtatgtgcaccacaatcttgatggagttctctgtgggaatttcgctaactgatttctagaccgatctctatgccttgttccgaactttgtcggttccaaatattatcattctctttgaggtaggcttgatttgccagttcagttgacaagacactgctaacaactcacagtacgctcttactgaatcccgtatcatattcttgtcttcccacacctccatgctctatctcgcgaccagagcgttggtcgatcttttgttccctctggaatggacaggcgttctcattcccgtccttcccgcacgcttaatccaggctctcgaggccccttgcccatacatcgtgggtatcgagcgtcggtatgagaaggtggagctgccgacggacgactttgtcctggttgatttggacaacaatatgatcgaaagcaccatccaaccgacttctcttcctcgtcatcagcgcaggaagctcctctctttgttgcaactagctgcccctcagcacggtcgatgccacgtccctaccgggcctcctgcatatgcaatcgagacatacccatgggactcgttcatgtcagagagcaaggccactttcacatccaaagcgcccgcaactaacctcgcgaaatatgtcggtctgaactccagtgcattcggtgcatcggccgtgacgccaggctcttatacacctcccatctttaacgtcttcctccacgcccgagccgagggtggcccctctcgtgggtactcatctcgcggtactgagcgcccagggaccagctccactctgagagtaagtgcctctccgccgtccccgagagagaattcacccacctctggcttcttccctcctccaacttcctcgtcgcgcaatgattccggtatggcgttgcaagcttcattgcgcgagaagcgttctggccatttcgatgccgcctcacgccgaagctcgtcgtttggaatgggtcgacgtccaagtgctccgttcctcggtcatgcttcgaatctctcattgagcactctcaatactgactacggagccggatccacatatgcgccatctgtgtatgcgcagtctaccatcgctgcgtccacgattgtccctcaatccacataccaacccgttggcaataacgagggcacttgctgggctgaaggtcactatttccaagtccaaccctgggatgacaagttgacatgtgctatctgtgatgaactggccgaggaaaatatgtacaagtgctctgcatgcagactgacagtccacaaccgctgcgcgtccatggtgtgtctgccgtgtgatgctgccttccatccggatcagattcgcgcggcgtttgtcagatgctttgccagcttgttctacacgtataagaagttcctggtgcctgccagtggcgataagaagaagtccggtatgttttacaattttaacatggacgctttcatgaagagccttccaagtgagcacgccgagtatatcgcaattctacagcagacacaaggtaagtccacgaattctgctatcgtaccatggaggtaatattgacccagtactaggattcaacgagttcattagtgaccgtgagcgaacaaacccgaaaaccaaggatccgcgcatgaccctgttcgacgaaattgttctttcgaagcgtaaccgcggccgcacatccatcttctccggccgttccacaacagacttcctctctgacacctcgaaccatatatggcgtacagccaacgctaccttcttccccccaagcagccgcagccagcagaatatttcatccgactacggtagaggagttcgcacaagaggtacgcaacgctccaacacccaatctgattctcccactgacaatctccctgcagcaccggcaaatctagatcctagcctgatgacagaaccccgcatgatccacggtgcgccacgggtttccaagacggcaaatactgctcgtagaaagccgttgcctaaactgatgaacgggctcgccgtctctccgcccagttaattggtgtgatttccacacgcgagtgacccgtccatcatctcgtcgatatctgccctgcccttgtgcgggtgggtcctttgtgcgcgggcaaagtgcaatgtccgcctttttgaaacacttccctctgtttccttgcgcaaccctgaaacctgaaactcctcccgattccggctcggacttcgatttccggatggtggcgctgcgcagtccatgctttatctcacgacaagcaaataggatggcagttcctgctgcgtgtcttcgtttgggcagtgtgccatccaagctgagaatgacaggccgctggctcggctctactccttgcttaccgatattaccccgcaaatggaactgcatgtggttgcacgcctttagcctctctcccgcttgaacttgcttcccttatctgacctaccatgccttatcgtggtagaaccgacgtctggaaagatgtcaaacaaaccacgtgccgatcctcagttgcgttgctgtcttcgtacatagtgttgactccggcttgatgcacggagccatgaccaaatcccctaaaagcgccatcccggattgcaaagcgatgtggtgattatttgtgtgcctgatattgattgatacatacacgtttattctctgaaccaatacctcactctgcttctcttgcccttccccctcttatctctcggcctgcgtttctatcttttccttcctgttactacccaataccccctcttgatttggctggtattttctctccttctgtcttaattggttgtcttaagtacaagctgggtggatctagtctcgatttctgttttttccatatttctcgtcatttcggtgtcaatcatacctatgctacgtggttcacgactatccttcgggtatattttcctttcagatctgatttgacactgtgacttaattttggttgctttccttgcatcaaggacagaaagaagaaggaacaatacatagatggttgttgtaccgtgcatgttgcgaatataaaactatctcatctttgggtttgcgctttgtacaagtatccatgcactcttccaccaatcccgatgtctgattcattgtttatctgtctgcctcggatataataggctatgtaaaggctgagcactcgctctcccgagtctgaggccttggatcggtggttttccctcgtatcggatcatggcggtgtagtacagccctgtcagggcatcgtgaggctgtgccggtgccttaagatgtttcataaacgctgatgggaccatacaagttgtagatgcggtaattagcaggatttcttcggcatacaactgctggaacatctcctttccactgcacagaatcccaattaatacatccagatgtagtataattaggcgtcgcgcaagatgattggtggagaaacccaaactccgctcccactttcccccgcattcgcattcgcattcgcattcagccgtcgacctacgtaggattctcttgtcgcgcattgggtggaacctccgcgacgagttcttccatcgatggcgcctcaaatgccgtcctttctgatcgtcgcggctgcgttattggattgacttagcgtccctttagtcgacttgtccccaagttaccccatatattcgagctagcctcgatcggcccgctccctttttcctaattgcgttggaaaaatatcccatgctttaatatactacctgcctattacattacccgggtcctggccgtcgagaagcgaattgcttggtccttgcgctcattcaaccctccccgactcttatttctacccgtcttaacccatgcttcgacctgcacaaatatcctcgccagcaccaagtatgaaacccattgagactgccgtgccatgattccgacagcctttccgcagcacatggccacgccgctgctcgacgatccccctatctctgccgccctaaaagcccaggctcctcctagcgcaaaccccaatatcgccgtcccttttaatgctgcgacaatcgtccctcccgctactatggccaccgagcccgaagaccagacagtcgcgagcattgctgcgccggccgccgctactgccgtgaggactgtcgtgatcatctacggccagaatcaagagcatattgtacaactggttgcggaaattctgggcaagccatggacaacagatgagtcgcttgggatgcttgcgcgagccagcaatgcattggtagtgggaatcttagcgcacgatctagcgcggagcttacaaggatgcgagcgatcatctctggtcctggtaaacacgtactgcgtggaagacgggtctgcgccggaagacgcgctcaccgagagctgtgactatgagttcttatattcgcggagtccgttcctgcgccgggacctggcgcgatttttgtctttgatccttggccagacgaggccgcatgatgatttgcggaccaagactaggacgaattttatctcgactacttttccggatgtgcatgctgctttgccgaatttggatatcctgtctgtggggtcggatgctgttgagatccgtgtggatttgctggttgaacctgtgccggagggctcgaccgctccgctagttccaagtttgaagtatgttggtcagcagttgatgcttttgcggcagcataccgagttaccgattatctttactgttcgttgtacgagggagaatggaaagttcccggtagatgaccctgcgctctgttacagatacctgcggcgcgcgatacaatggggagttgagtatatcgatgtggaagtgtggctaccggaggatatacggcgccagctgttcgaagcaaagggccatagtatgattttatctgcgttccatgacatgtccgggacctggaaatggacatccgaagaggcacagcgcatatttacggaaagcgccaaatacgccgacatcgtgaagatgatcgccatggtccacacaatcgaggagaactatgaactagaatacttccgctccaccatcaaaagccgaggctcagggccacctctgtcagcagtcaacatgggccaaatgggtcagctatctcgagctctcaacaccgtcttctctccaatcacccaccccctcctcccaatgatcgccgccccgggccaactaacggcagcggagatcaacgaggccttacacatcatgggccaactccccaaacgcgagctctacgccatcggctcattccgctcaacgccacattcaatgttcatggagaaatgtataaacgagctcggcctcccgcacaacttcacctcagtcgacctaggcccaaagggctccatggaatccgtcctcctacaaccgcacttcggcggcgcctacgtcaacccccccgtcccaaccacaactagtttcatccctgcagtcagcgacgcagcccgcgcaattggattagtcgacacaatcgctatgacacccgacgagactgctgtaggaacgtgccgattaattggcgaaaacgccgcctggaaaggcatccgcgctaccctgacgcgcgaatacgtgccgtccgcttacagcggccgggcggcgataatcctcgccagctcacaagcagacgcttcagcggcgattttcgcgctacgcagtctggccgttggcgcaatctacacagtcgggtttaaagcgagtggcccgctcgcggcgggtctggagccgttcacgtccatccagtccgtgaaacgggtcgagcagccctttgttattgtctctgcgctgccgccggagaaatcgctgctcgtgcagcctttgctgagacattatggtgttaatggtcgttcgtcgccgccttctactcgtgggaaggtttatcttgatcttacgagtgggacaagaaagggggatcctttggctgttgctactagtgctggatggacggcgtatggagttgaagatgttagtgcttggactaccgttgagacgcttaggttgcttgttgggcaaaatgtgccgtttgacttcgtgcgcatggcgtctgggagacctctgttctagtcatatatattataccgcatacctacgtaggtgatttgtagttctgtttcattgtttgttgatgccatgactgctaacgaccagacatatatatagatgctgaaagataagaacttatcagaaaatccggggtcgacccctcaacccctcatttcctccttccaaggttaccccaagctttggttctctctacctctatgcatatttccttctagattcatcgaaacaaacagaaaatgcatctgcgtcctgatcatgcagtccgagacctcccaaccctccacgcctttatcgaacaacacccacttggcgtcctcaccacttcgctcccttcagagaatcatcccacactccaatgcagccacatcccctgggtgttggacagtgaagcagccctcgaacccgagttaccgaaggaaacaaccctcgaatctgagttagcaaaggaagcaagagtacccgatggcagcacttccgcaccgccatatccctccctgggagttctccgcggccacatcgcgcgccaaaacccgcaaagcaaagcgatggtaaaatctgccttggaatatagcaccaaaacaaccagtatccccggcgcatttcctataaccaattatgcagaagaaccaccgacatcaactagctacactctccctgatgaggtcttagtcgtctttaccagcccagtagaccactacatcacgccgaacttctacacagagtccaaacccgccacgggcagggtcgctccgacgtggaattacgccgcggtgcaagtctacgggcgggcgactatttatcacgatgcagaagacgaacaaacagagctgttcctacgacaacagctgggtgatttagcccggcttggagaggaaggggtaatggggtttcaggatgagtctgggtttggttcgggttcgggttcgggacctgatgtcaaacacggaggtggtgaaaccgaaactgggaatggggatgaggagggggacccaccccaggaccagaaccaaaaccaaaaccagggacagcgccaaaacctgatccctgatatgcagctgaatcaggggtcgaagacggccaccggggctggcgggcatggcgacatcatgccattgccgaggtcgacgtcagcaccttggaaaatcgccgatgcgccactggactacattgctgcgcttttgaagaatattgtcggcatgaggattgaaatcacccggattgagggtcggtttaaggttagccaggaacggccgcttaatgatcgtgggggtgttgttcatgggttagagagcatgggtgggagagcaaaggatatggcggactttgtgaggagagggaaggtcttgcctgggcaatgatggcattaagctttttgtgtgtatagatcctaggcccttcgagcacgaagtatccgcagtacgtagactaatagtgccaagctcgcgaccacgtacggagtgcagcccctactccgtagtgttggcggcccgggcttggcatgattactcaacataaaatggtctgtgtagaagcgcaaactcctcggaaagttaaaaaaagaccaggatggagattccgtctcgaatacagtagctgcagtggatgatcagggatcggacgcgtcttaatcagaaggtgtaataagcgggggccaatagtagtcctgtaacagccaccttcatagaccgtaccttttgcacatacctcgaatagttctgcaggaaacacgggtaaaatgaagggtcttaggggtctagatggcaactgagaacccccgtggtgggatggtggacagacgatagctattgactggctagatacaatcaagctactgcaattacgtgcaattatggggtatctggatcatctcggatgctggcggcgaagccctaaagcgggtggcattccataaaggggaaccatcccccgtctatacagattaaaggggactgaaaccagttctgggttgaatgggatgttagaagtagagtgagtcgagaataagaacgaacataacagctacatatcttcattgtacatatatatcatcttctagcctaaactatggaataaatacaaaaatctcctctccccccccatgtcagcccgaactggggaattccggcggcacatcacttctccgcatttcttcctctccgcaacctgatcatggtataggatttcccttttttcctaaacgccacagccatgcgcctgacctcttgtccatcttggccgcggccgtcttctttcttcttttcttatctctcttccatgtagaagtgccatgtctcgtcctcaggtcagcatcgaccgtctcacgccccgccgtgcgacggttgagccgcgcgaaaccatgaattgcaaatcctgtcgcaagcgcaaggtacgtctactcagtgctagtgcgattggctctgtctaacttgttatagatcaaatgtaatcgtatgcgaccgagctgcgaggcatgtaaggtcttccagtgcccatgtctttatggtgagtcaatcatgtcccctctatatcaaacgactcctctgttaaccttgttatgttcaagatgccgttcccaaaaaacggggccccaaaacagatgtgctagaagctcttctcaagcgggtcgatgggttggagaaacgcctccacgacgaaaagaaccccatctcgcccacttctcccgataccgcagatgatcagccgagctttcctgcccgtcgcaacaccgtcgacgcttcttttaatatttactcttcgagcgatcgatcggctctgccaacttctctcccccaacatgtggatcccttcattaggccaaccggccacccagcaggtcttctgcaacagccctctccgacaaacaatggtccactatcggatgcgaccctggatctttacttcgagcgactgcacggcaagccattttatatattagacgaggcaacaacgcggcagctccatcaactgaaccaattacctccgtgtttggccatggccatctcagcaatgacagtaaggtaaaaccaccaagcttccaagcgctgtcacatagcttacatgtttgactgacgaatcttagatatacaacctcgcctggtcaagtggaacagtcactacgttccgggctcgatgcggcgctacaagcaagacgtatgattgaagtcgacgatcctacagtagaaggactacagactctattgttactttcgcaagctttccacgcctatggtcttggaaagaaagcttatatgacattttgtatgcttggcctcgatcctccatggtggaatgaatttgactaatgatgctagcaaattgtgttgccatgatcgtcgcgctggatttgtatcgggaggctccctccaagcccaatatttcgcctgccgagcgagaaatgaggcgtcggctattctggtctgtttacttgatggacagattcattagctgtggatcgcgacgtccatgtctaatcaccgatcattcggttgttctgcgcctaccgtcttgggcaccacatgcagccggtctgaacatggagggagagctcttccatgtcggtccgaacattcaatattcttctgattcccggcgcaaatcaccaagtgctgcctctttgctgattgatatcacgcgtattcttggtgtcacgaataagtatctggcagctggcggagtgaaaggcgactctcacttcccatggcatgcgctttctaatctatctaagatccgacaagaattagatatatgggccgctggtacgcaggacgtctttgcgtctatcgactcattgttcggccaccctgagagtacaacacttttgctgagcaagttgatctaccatttggtgcactgtttgatctatcgcccgttcttacccattgacctggtagagctccggggtacagggcagcatcagtcctggcaaattgaggccacgaacttgtgtttttcgcactccaatgccatcgcagagctcgttgaactgggtcgcaactccccgctaatcgagtggcctgctttcgtcgcatactgtgtgttcacagcagggaccgtgcatgttcacggtgtgcactacaagggccgcgaaggagaggttttctcttctagcgctgaattcctgactcgggagatgcaccagcttgcttggctgcgtaatatttggactggcgtccagcatcagcgtgagctgctccagactatctatacgtgtcactccgaattagtacgcaatcttgccagtagcccaatgcggttttcgccagtcttccacctcgaacacttcctcgaccgatatcctggtctggcgttagatggatcacatgttcggcttatagatgcaggggatgatctagctccaaggtaggtcctgctggttcgttttttgcatacatattatatgatcctaactccgaagacagtgctgcgagcttcattgatcaccaggatcactactaccaacgaccaatcgccacaccctcatatcacaatccttcaccctacttctcaaatacccggcctgggccctcgagtccgttaccatccagccaggcctcagatatcgaccgtcgcaactcccattcccattctctatctcagaagccatcccacccaacttctctctcgcccagtattcaattccacacgatccaaggcaatcaacagcaacaatcatcatctgtcttctccctcccagccggaacagacctatccggtcccggcacatcagagaacacccacctctcgatcccgggattctccccctcgtcctttggactctccccaccagcctacctcaccgacgcttccatgcacatagcaccaacacccccaaacccgcaatacgcaaccttcccattcgacaccactcacgcaaatccgaacggaatgacgcaagcaggtcccaccgccctgaccccaggcggccagtcccacactagtggcactcacaccacagccggcagcgaaaacacatctgaaaaagacccttttctgcgcttgctagaacagctggctgagaatgagaactcgcagggcgggcctagtgagcttgagttctttctgacaggtaccggtgccgaaggtgatacagctattcctcttgagaaagatagtgcttcgtagtaggcggaaattggtttgggaatgataattccctcatatatattctcattctgtgtatatccttcgttgcatagcttgtttgcatgtaggctatggccgagttgactgatacccattgtgtttattgtttctagctacctagttactatgtgagatctgagtcaatctatcatataaccttggaatgctcctattagagctagacagaatctcattactaattttcattgttcacccggcatctgtgctcttcgcccggagttaccccggtctcggcggagctcccccccggaacnnnnnnnnnnnnnnnnnnnnnnnnnnnnnnnnnnnnnnnnnnnnnnnnnnnnnnnnnnnnnnnnnnnnnnnnnnnnnnnnnnnnnnnnnnnnnnnnnnnnnnnnnnnnnnnnnnnnnnnggagctccgccgaggaaccccgcgttgtaaccgatttgtcactcctctcctctcccataagatccttgaccatccccttcttaatgtcacccatccagcgtctcaaaccaatccaacgccttaaatctataacaagtcacctccaacaaacctccaaaatgaaactcctctacccaacctccctctacattgacgcgaagtccctagaaggcttctccgtcgaattgcatccctacgacgtcacagtcccaattcccgaatccctaatcgacgccgagttcctagtaacatgggccaacaaagccacgaacctccgcgacgcagcctcccgcatgaagaacctccgctggatccagtcgctagcagccggaccaaacgacgtcctcggtgcgggcttcgacgcctcccgaatcgctatcacaaccggctccggcctgcatgacgagacagtcgccgaacacaccctcggcctgctacttaatgctgcccgccgcttctatgaaatgcgcgactaccagaaccgcggcgagtggcccgcccacctgggcggcccccagcccgatcgcgcccccggcacgttccgcaccctcaagggtgctaatattaccatctggggattcggaaatatcgccaagtctctctcgcccgtgctgaccgcgctcggggctaatgtcaccggtgttgcgcggagtactggtgtgcggaatgggttcgaggttgttgcggaggatcgcttgcaggagattctccccaagactgatgcgcttgttatgattctgcctggatcggcgagtaccaatggtgcgcttaatgctgagcgcttggctttgctgccgagtcatgcttgggttgttaatgttggccggggaacttccgttgatgaggatgcgctgcttgcggcgcttgaaaagggcagcattggcggcgcggcgctggatgttttctccgttgagccgctcccgaaggagtctaagctttatgccgcgcctaatcttattctttcgcctcatgctgccggtggacgtccgcgtggggctgaggcgcttattgcgtttaacctgagacggcagcttgctgggcaggagctgaagaatattatttgagcttgatgtggagatggctgtggaggtttcttgatagattttatgagtacatttacgaagagggttagacgccatgctttgcgttggtcttgttttgattacaaggaactctagaaagacaattacagccgaattacacaatcatttgagaactcagaacataagtgtgatcaaaattaatttgatataaacaaagagggaagactatatacaatttactatatacaacaaagcacaccaaaagaccctatttttcaaaacaccgtatcgtaaatgccatcactgtgtcacctctcagatgcggggtttactgggggcacagcatgaagaagggaacgcattcttcgactgggtatcaacacaaatagcagaaggaggcacccagagggcagggttcttctcgaagaagtttgacgcacgcagcataatgctaaccggctcagcaggcatgatggggaaatcctcagttcgcgggaaatgcgtcagaccgaactgcaggtagcagacgatatcggtgttctcgatgttctcgtcgcgcttcgcccagtcggcgatggtcgagttgaaggggtgtccctcggagccgtcagactggcagacgtagtcaccagcggggaagagctcgtagtccttgtaaggagtaacccagaggggcttgcgggcgaaggcggcacgcttccagacggtgctgccgggcttggcgagcataggggggcagttgttgttgaggatcttgtaagcaacgggctttttcgcaatggcatgaatgcggttcgggttaatgatgtcccatgatcggttggtctcgtagcagtagtctgcggcaccctcgagggatgtgcggaggggagtcttcttgctgtagaatccgttaccgtaggggttctctggggagccgacggcggcttcggcggagacggcgtcgttctggacgacggagttgttttggccgtcaatttcggggtcgatgcggagggagaacaagtgctggtggttgtgggcgttgatggagggggcaacttctgtgccgaagggagcggcggtttcggtcgggtgcatgcagtaggtgttcagcataccggtgagcttaatctccagcttgtaggtaccatccagggtgaagatgtggtagaagccgtattcgtagttggcagcggtgatgatttgggacacgatgagcttgcggtcacgagcggagatcactgtgccatcacggtagtcggtgtgcttgtagaggaggccgttgtcttcctcgtgaatgcagatagcgttcttgacaacggcggcctcacccttggaagtggacatgataccatccatgtagtggatgacacccttgcaatcacaacccagctttagggagttggtcatcaggccagtgccgtactcgccgacatcgaatgcatgcttcttgtggtggggcttctcggggcagccgtaggggacaaccatctcaacgacggagatacggttgaagagagtacgctcgcggtcctcgtacatgtcgtgggtgcgcacgtcggaaatgacaataccttcacggtagttgaagccaatgtgcatcttgaagttggcccaggacagctcattgccgcggaccttgaaagagacaccctcgggctgggagatatcgatgggcttgaggcgatcgtggttgtacttgtcgctgatatattcggggaggtagttgtgctccttgagaggggcagcggtccgctcgccgttgacgtaacgaatgtcaacgctgagaacctcctcggtgtcggtgtcggcgacaacgctgaaatccagagggtgggcatattggttatcgaactcggcgttgcggtagtaagccagaccctgctggaggcggtggtcgtatccccagcgctcgtcgatgccgatagcccatgcgtcaaagaagaccttgctcatgtcggtaattccaatgtcattgcaggcccggataacgcgagcgtccttgcgagcaacacgctccatcacatcaagatcctctagggtgagggtaggcatgacatcgtgaacgtccttccattcctcaaccttgccggtggcgagatttgccaccacctctgcgatcgtgttggtttcggggacaaagacaatggcgaaggcacgacgggcaggagcggggacggcgccagcgcggaatgcccggtattctgctttgataggttcacggagtgtgatgcagttgaacttgacaaacttggggttggcgtattcccggatgatctttgccgcttcgggaatttccttgatagacagttgatctagggttttgagttagcggagctctcggattttacacagaggacatagcatacctaacggatgaggagtgccttttggcagcatggcagcggcggcaacactttcataatccccgtcgcggaagattgtgtagccaggaattgactcggtatcaggagcagacgccatgatgaagatgtgaaaggggtatcaaggggaaggagagagttgtaattgtagaaaaaccagaagttccattccaaagctgcgatagaccttatatagctaatcgaccttgaacgtctgatcgaatttcgccgcatgtaccttcctaatcgggcaatcaagaaatatatctataacctaagcagctccgacaaagggagcgaatggtcccgagagtgggtactctggccgttgctcaatttgggttaaagtctggagaagatgtgtctttgcacagcatgtgtccgagactttaattctatgccataatatgctttgcgtaaagtgtttgccatcgaaattatcagccaatcgcaatgcaacggctcggagcgatgtgttggccacagcctttcgctagtggttgacctaataaagcaagtcttctgagaaagactgtgcatgggcactagaggaaaaacctagcccaatttgacaatatctgatctcttagacgaattaggggagcatgcgactggcagggttggtgatgccaaggcgttaaatcaagcttattttcacgtggtcttgatgacataatgtaagccgcatccctagcctggggcagcccatcaaagccgttctatcacacatgaccccccctgttttactgtgtcgtagaaatgatcaatatccccattacatatggaaacggacgagcaactcgttgaccatatctttaacctaaacacatgagacagcctttgggtggacttgcctgttttgggttagcggctcttgctatcagtgactggggactcgtcaatccacgtctatccacatcaagaaacaccccactccccaccgttttgaacctcagaaatctggagctcggcctttttttaggtggagtcgataaatgtatcccgataagctacccagaatggcatgtccatgcgaagcaattgtcgcaaattacatagagcttgaagaaatagttacaaattcatctcctctagcttcactgtcttctccaaacaacatcgcgaagtacatataatcatggccgacttatctgttcagctcacagcccccaacggccacacttggatccagcccaccggcttgttcattaacaaccagtgggtcaagtcttcgaatggcgagaagattgctagcattaatcccacgtgcgtgagaaattaaaaactaagtgtccatgtcttaattccctaactgactggcgatcgaacagaaccgcaaaggaaatcacatcaatccacgcagcttccgccgaagatgtcgacaaggccgtcaaggcagcgcgcgccgctctgaataacccctgttggcgcgacctacccggttctgatcgtggcaagctgatgagccgcctggcgcagcttatcgaggataatcgcactacgctcgccactattgagacaatcgacaatggaaagccgtattccacttcgttcaatgacgacctgaacgagaccgccgagacccttcgttactatgcaggatacgccgacaaggtctttggtcaagttatcgatacaacaccggataagttcgcctacaccgtacgggagcccgttggtgtctgtggccaaattatcccgtaagttctgagatcagtcatcaaacaccatcgaagtcaattgctaactatggcgctaaagatggaacttccctctcgccatggccgcctggaagctcggcccggccctcgcctgcggaaacacagtcattctgaagccagcggagcaaacccctctctcagtcctcttccttgccaacctgatcgtggaagcaggcttccctcccggtgtggtgaacattgttaacggacttggcgccgtcaccggagccgcactcgcctcgcacatggacgtggacaagatcgccttcacaggcagcacggcgacagctaagcaaattatgaagatggccagcgggaacttgaagaatatcaccctagagacgggtggtaagagcccgctgattgttttcaacgatgcggatctcgagcaggcggttgaatgggcccatctcggcatcatgtataaccagggccagatctgcacagccacatcccgcattctggtacagaacgaaatctacgaccgcttcttggatgcatttaaggcgcaggtgaagactgtctccaaggtcggtgatccgttcgaggagtccaccttccagggcccgcaggtgacgcaggctcagtatgaccgcattatgtcttatgttgaggttggcaagtccgagaaggccaccctagtcactggtggtaagcctttcactgttggtgatggtaaaggtttcttcattgagcctactgttttcgccgatgttacgcccgagatgcgtatctaccaagaggaggtctttggacctttcgtggtgatttcccgattcagcgaagagaaggatgcgattgagatggccaatgattctatttatggtcttggaagtgctctgttcacgacaaacttgactcgcgcgcatcgcgtggctaaaaggattgaggctggtatggtctggattaactctagcaatgacagtgattggcgcattccattcggtggcgtcaagcaatctggtattggtcgtgagcttggagaggctggtcttgctgcatactcgaatattaaggccattcatgtgaacatgaagtcgaagctttgagaacaggactcgaagggcttccgaatctggagggaggacacattatattgtacatagcaaaatcgaaacttccatatgacaaaaatggatatctacgcaccttttctatctttcttttcatctggtgctttagttgaacttatctgtgcagagaagagggtcatagaaaaactgattttatgtgaaaagaaggaaatatatttgaacaagttgagcttttagttagaacacgaataaccacatcaaggcgacctcctagcagttactagtggaaaacaaattcattcagggcaaattgataattcaaagagactcgtgatttttgatcgctgagttggattagggcgcttgatgcaacaatatataatggggaaacctctgaatgatgtcaaaaccaagggattcattaggtgtttgcccctcgcgcaggacttcggtccacataaatattcttagatctgagcttctttatacattttatacattctactattcctatattcacaacgtactgtaaggtagatctcgacagctctacggggctcaactcaactggcaacgcatttttctaaactaaatgaaagctgatctatatacgcaaagcatggatgtcaatatatatccaattgacatcccagaaaatccatattttacttgacaaatccgaattcaccaagcgaaccgcatgtccaagaacattcgcaacattggatgaacctcgagcgactcgatccaagaaaacctctcatcgatcttccttttttggctcagggatcggatcattcggaaccgcatgggccatgatgacatgaagattggattcctcggtgttgagataggtgcgacttccctggacgaaccagaacgacacggcgatgacaagcatgacgccaaacacaccaatggcgtaattcatctcatcacctgtgggattaggcgcggtagggaagaaaaagaaaacagtcgtcacactgcaatacacaagggtgacccagtttaccggtgcacccagtctcccaaggttgaactcgccaccaggtgggagtttgtctcggcccatcagcaacagagtcatgacaggaagcccgtatgagatggtcagggcgatggtactaacgctgaggatggcgttcagcactgtctctgcaaacaagaatagaattccaaccagtgctatgagaaatccctggaaccagagtgccctgacgggggcctcccagtaaggactcacttccgataggtaggtgctaaaggggagtccaccatcgcgggcaaagccccaggtgaggcgggatgctgtggtcacgatgctgactgcctggcctaggccgttcatgatgaacaatgcaatcagcactgcgcctccagtctggcccacggtttcttggacgagttccataaacggcaggccgctaggcgagtttaccactgtattgacgtcctgaatacagaagaggcagaccaccatcaatatgaaaccgctcactgctccggtgatcacggcgaggtaaatgactttcggagcgttcttgcgaggtgcagggatctcttccaccaagtgaatcacggcgtcgaaggcagtcaacccatacgcagcctgcactagaccaataaaccagacaacgccatcgggccagccagtttggttgatccatttcccaaacacgaaagaggcgggctggaaggagagaccgtctttcgttccaactgaaataagcagggcaaggcagaacacaaagaatagtccaaagaaccagactccgacaaaattgttcagccacgggaggaatttctccctccgacaacccaccacattgatcaatgtgagagcaaagacacacgcaatataaaccacaaactcaagccaccccttcgacgcaccagtccaggttggactgaacatgaccttcataccgagaaggaaattggtcataaacgccacctgggaggcggccagtgtccaccacccaaagacattgatccaagcacacatgtacgagagaaaacgtccgaagtgtgagtcccagagacggtagatccaataggcctgtccgagggcagtgggcatgctgctacatatctcacccagcgagaaggcgacacaggtgttgcagaatgtaacaagagacagtccccataggattgagacagggccaccgttgatgagaccgtcggagagatcctgtgcaaaggttgaccatgttcccagcacgcagaatgctaacgctagcatgctccagatgttgaatttgcgggcgaggatttgctcgtggccgaattccgcgaggtcgttggcatcttgtgtgtgttggtcggtaggtttgacggttggttcgttttccgcttccatttcgagggacgggagggttcagagcgtgcgagtatcaagaggatttatagagtattcactctaggtatttcccagcaacgtaattgacgccgttgtgagaaagaaggacttgtctccgggctgtagatcgtatactcctcctgaaggcgatattgaaggtccaataatgaggtcactgaagcagttgaatgaaccggatgtcccgtatgcccattcacaaaggttttgttgttttttccgggaatcccatggcgtcggcctccatggccatagaggagggcacgttcactggatattcaccgagtggcccacatgatagatctaagccctgaaggcattttacacgattaaacgacacatacatactgaagatctgtacagagatccagttttgctccagtttttttccaccccacatccgacgaagattgaggaatccctctctggaaggtagatgcggtttgttacgtgcagtgctaattatatcgatggtatttggcgtttgctggatatccgactcgagggatcaccgcggatgttgttctgatacctgattccttgactcacggctatcagatcctcccgaggtcggagttagtcgggttaatgcggctgcattcattgaagcccaacggtcggaaagcctcgatattgtctcttggaattgataattgacttttcgacaagtacaatttcttcatcttcacggcaggactaaaccccggaaattatagaactgtcggcggagaggctgaaaaagacaagcttgtttctcctgcatctgcatggaccttccaaaagcggcaagctcgccttgaaatccggtcgactttgaaactggaccagcttggacttcacagaccatgagaatgagaatcttttttaagaatgcgaggaaactagtgagatatatccctggcagtaacccgggaagcactccctataggagtttagaatgcgctcactgagatctgtgtttggccaatcacagtccgagtatgcgcatagcaccacgcccgcctcctcgcttgcgtgagtatatatgagtgaattgtagttgtaggatttccagggggtttctgtccttgctcttgttttccttcacaacagttctctcagtagcatgccttcgaccgagaagcaaaaggacctctcccggcgtcatcgctctttcaagggatgctggacctgtaagaaaaagaggattcagtgtgacgaagcgcgcccagcctgccaaaaatgcagttcccgaggtctggcttgtgagggatacgagatccgattgcgctggggagctggtatcgcctcccgggggaagtactcgggcgccgagaagcccgtgaaagaatatataccctcgcggtcgaaacgaagattggatatacgagacgagggggacagatgttttcctggagatgaagatcgtcagcctgctgtggtctcgcaacctctgacaaaagaaggtattgctagttcatgatggtctttataattctaaactcacacattcttctagatcaaaatcaattagttgccgaacgagcaacggtcaatatacctaactcatgggaaccgaattctccacgaaactcagctatcaaaaagcactttgagatacctaaatccttagccactttgagtgtaactgctgtggctgtgaatggtcgggatgaagatatatcgagtcaatatgcccagaacgcgggccgacggagtatattggcttgacctgagttttcattcttggttttgtacttgagcactgcaaatcactttttttttatcatgaatttgggactaggtccacagcgaacagactgagacatatgaaattggtattaccatattaaataactatatcctattcatcctcccggatcgtctcagtacctcctttccgccctttttcttgtaaatgatcagtcagctgggaagcttcagatcgatggcctggtcgccgggtatccaaactatcgaaagattcatagaaatgggatgatcggccgctcatcacgttttcaatcgacagtggtgacgacaatgagagtgacgatggacgtcggctgtgggctgctggataggagtactccgaacccgtctcactaggagtctgcggtgagacaggagactgagagcctcgtctcggatcgaggttgggcccacgttcgggttcggacttgggaggtccgtcgtgggcataataggcggtgttgaatgacgttggaagctcaacaggtgatgaatctggtggatgtcaggtttagtactccgcaatatctctttcctatcggggattgaataaagaaagtcattaacataccatgcatctcatatagcgcatctcctccagattcaaccgtgccaggggtcacaggcgagatgagagactctggcacggttgacgcctgcgtcatcgatggttgtgttgtcgacggctgcgttcctgtggtctgcgtcgtccgcgccgtctctaccgtctccataccagtcgatgaagatactggcccaggcccaggtgcggctgggccgctcgcatacatccattccggaggaaggttctgaggttgcgcctcagcagcttcggatttagcctccgaaacctcgtgtttacggtgacggcgacgataaagcaagaatccgacaaggagcgcaattatgagcagacccaagaccgcaccgattactccaccagcccacccggggaatccgctgcccccgctgctttcttgcgcggatgtactggcgctgccaccgctgctggtgctgttgctggtgctggtgctattgtacggccaatatgtctcgacagtcttgccatacttctttccaaaaatccccgctagagagctgttcgtccatgacgatggggcggtaatggttgcacttccattggagctaataagctgtcagccatgatgattgcattatgtactgctgaggtatactcacttgccgcctatcagtgccgtcacaagatctggcactttatacttactccaagtcgtgggatcatattcatcctcaaaggtcaaggtgttgagattgaaattgacaatgataccaccctccaggcaataagttgagtcgacatgctgccctccaaccgctagcatttgatcgggatatactttgatgcattggtgaccgctgcgactgtgtgtgtttgtaccattgtatgccttgacccacttaaaggaaggcagagacaatatatacacgtcgtccgacggattggcgttatagttcagaccatcgtatcccccatagatgtaaatattatgagatgacccatcagccgcactcgcaagcacagagcagaactccgtcagctgtggcggtatatcacccgtcgtgttctggagataccaggctttactctcgacatcgaaaacagaaactgtctccatgaacgtcgggctaatccttttgctctccgccgtccgggttgagtttgctttttcattccggaaaaactcaatgggttcaatcactccgccaatagccactaaaaccccagactcagatataggtacccagaccagttccgcccttgaacgagcaggaatgtagctcggcagtgtgttgtttgtccacttcccatcgctcatcgttgacatgtcaagggtgattaacgtgttggccgtttggttggattgaagctggtttaaagtgaagtcgccccagtccgccgcgcgcatcccactgaagtaaaagcccaagttctcgcttggcgcagatgcggcagcaccattggttatatatcgcgtgacattggtggaaaggtattcttgttgccagttgggtgcccacgagcttctataggcgccatactgatgcgcggcatacgacaggacttggttagaaggcggaggagcagagctatcggtattggggagcatgcctctgtaataaataatctaagcgtcagtggtttcagtgatttattagagagaggagggacccctacccatagagatagaactcgttgtcgttggcaaacatcgttccatcaacataattcggagctatgctagaagcaccgccggcgacagacatgttgctgaggagtttcataaaatccgatgtagtgttgaaagaagtagtgaggttcaggtaataaatggtggcctccaaatctgcagctagttagctatatgcagatatgaagatccatttgattgcgcctactgttatctggctggggctcgacacaaccatcgtcaaatcctctgcagttgttagtgtaaatcagtattgaccgtggggagcctcatacttctgataccatagctcaccgccatcgaggtagattgtatcgcgcagaatattggctacccgtgtcagtaagaagacaactatcggaaagggaaacaagaaatgcttaccacgcagaccttgccagttgcacatggaaacattgatttgagtcgggaatgtactgcatacggccactgcgcagtctatcacgaccagcagcgtcagcagcgtccccaaaaacaagctcatttttcaattgaagctcatcgcggagggtttccaattttcgatgacagatccaacaatggaatcctccaggatttactgcagccatcttgcccaaatggaaaagcgaggaagcggggtctccgaccttgcgatgcgcctttgttgttcatcctctttgttgtcacctgcccccgccctgaatacgagcagccaatgagagaagcaccaaggattaaacgacgtgtagtgcgcccgttcagcttatggccataacgccatgatcattaccatgatcgtattgctgcatgactaggatcatgcactcacggagatacagctgaatcaactggagctgccacattgtgtgctcgagttagcccctgattgcggtccataactccgtgtcgcgggatattttgcatttccttgtaccttgtaccgcgagatcgtcatgactatgctgcactgtccgagtcaatatccaccagagaagaagtctgagcctcgaacgaaatgttgggctttcttttattcaaaaaggggaccgtgcgtgtgttatgtattgggtgtcttcccattctgtcgaggtattttctttgtttagcttgtttaccttgctggccatcgccggaagaatttttcctacagacaagcaaagatgaaggtcgcggtcggtcggttgtcgctgttggcgattgtcttcggtttggtgacatcaagtcacagcagtctcatcaacagagccctcgcgctgccggcggaacaaaaggacgcattgaccgctacaattggagtcggggttacactttggctgggtgatggcgagtcttgcaccgctgaaactgtcacccacactgttacgcagaccggagatgtttctgcagctgccaccaaaatcatcaccgaggctaccacctacactataagtggttgccgaaatgcccacactctgagtgccattcccaatgtcggcattggacccgtggccgttgctgcaaataccgctagggcactgcccggaattgctcccataaaaacgatcacagattacacaaccgaggtgattacagcgtgtacatgcacagctaacttgactgttacgacaaccacctccagcgtacctgtacctgtgacaaccacctctagtttatcggtgacatccacatccagtatacctgtgacaacctccagtgtacctgtgacaatctccagtgtacctgtgataaccacatccagtataccggtgacaacgacctcgagcgtacctactaccagctcgagtatacctgtgacaacctccagtgtacctgtgacaatctccagtgtacctgtgacaaccacatccagtataccggtgacaacgacctcgagtgtacctactaccagctcgagtatacctgtgacaacctccagtgtacctgtgacaatctccagtgtacctgtgataaccacatccagtataccggtgacaacgacctcgagcgtacctactaccagctcgagtatacctgtgacaacctccagtgtacctgtgacaatctccagtgtacctgtgataaccacatccagtataccggtgacaacgacctcgagcgtacctactaccagctcgagtatacctgtgacaacctccagtgtacctgtgacaatctccagtgtacctgtgataaccacatccagtataccggtgacaacgacctcgagcgtacctactaccagctcgagtatacctgtgacaacctccagtgtacctgtgacaatctccagtgtacctgtgataaccacatccagtataccggtgacaacgacctcgagcgtacctactaccagctcgagtatacctgtgacaacctccagtgtacctgtgacaatctccagtgtacctgtgataaccacatccagtataccggtgacaacgacctcgagcgtacctactaccagctcgagtatacctgtgacaacctccagtgtacctgtgacaatctccagtgtacctgtgacaaccacatccagtataccggtgacaacgacctcgagtgtacctactaccagctcgagcgtgtctggcacaatcaccacgagcgtgtctgagactaccagctcgagtatacctgtgataacctccagtatacctgtgacaaccacttccagtgtgcctgtgacaactacctccagtttatcggtgacatccacctccagcatacctggaacaacgacctcgagcgtacctactaccagctcgagcgtgcctggcacaatcaccacgagcgtgtctgagactaccagctcgagtatacctgtgacaacctccagtgtacctgtgacaaccacctccagcgtacctggaatgacgacctcgagcgtttctgacactaccagctcgagcgtgtctgagactaccagctcgagtacacctgtgataacctccagtatacctgtgacaaccacttctagtgtgcctgtgacaaccacctccagcgtacctggaataacgacctcaagtgtacctacgactactagctcgagcgtttctgacactaccagctcgagcgtgcctggcacaaccaccacaagcgtgtctgagactactagctcgagcgtgcctagcactagcgtttctggcactaccagctcaagtgtacctgtcacaaccacatccagcatacatacgacaaccaccctaacaacatcgaggactattactgactcgactgccactgctccggggccgacgacttcaccatccactacagtaacaaccagaaccacttccagctctgtaggtgttaccactattccagtgtccacaacatcagcggctgccaccgatatttcgactgtcactatcccaaataccactgtcactctcccgggaacaatacttccagggaccacagtcacgacaatcattactgagactgccactgtatcaagtggtagtagcactttacccgggtccaccggtaccacaactgtcacaagtccagaaagtacagtgatcagtgattcaacgatcattattggcactatcactatcccaggtatgttatcacccattggacgtcaagtattattgcaacagctaacagtatcagtttcgcaaacaaccaaaacaatcactcgtactctcaccgttaccgggtctagtgcgacatcgacccagagccctagcagcgctacgtcggtgcctgcctctgtatgctccagtctcatcagtaatccatcttacacaccccccgccgtgttgccagatgactatacctggggctgcgcacccggatatctctgcaagcccggtcatgcaggtgaccgctcgaattgcaatattgaagcaggtcttcccgaccccggatacgtctgcagtccctcagactgcattgtggctccgcctttagacgttcatccgtcttggcagtacaatgtctcgaacatttattacaacctcaatccggaggacttcggtctcaattattctatcttcgaagacccactggcagccaacaataagcgcgacatgtcgttgtgggatttcgctgtcgcccaaaggatcaagagggccgacataacgaacatccctacagtctgttacaatgattgcctcgatgctgcacatgagcctcaaatgcttggaaagacacctgagctctgcaagagtgactcggcgttcatggaaaacttggatatttgcgaggagtgcattaccaacaacgctgaatccggctctgatcaatattcatccataatgctgccgacttttgcacagtggctgaatttctgctccgatatggtcacttccacaacagcacaaagtgtgaccagtactcagatggacactacggcgacgagcacccagattaccgctgctaccagcacggaaacatcgacagcagccacggtcacgagtactcaggctagcagcgctgaagctagcagcactgaagctaccaccaccgaatcggcgaccactgaatcggcgaccactgaaccgaccagcaccgaatcgaccagcactgaaccgaccagcactgaaccgaccagcactgaaccgacgagcactgaatcaacgagcactgaatcgacgagcactgaatcgacgagcactgaagcggcgagcactgaagctaccagcattaaaccgaccagcattgaaccaacgagcactggaaacacaggaaatgaaaacacgagcaccgagcccacaaataccgagacaacgagcactcagtccgacactgctaccaccgggaccgagcaaatatccagcccagagacaactcaaccagtcactctcatcgccatctcagcttccggttcaattgtgaccacctcggtatctggttcgcttgtgacaacttctttctctgggtcttttgtgacaatctcaacatccggttccctcgtgacaagcttagtccctggatcgatcgcgacaacatcagtatctggcgtgcttatcacagcatccttgcccggttcgatcaagaccgtatcaagcactctagggacagagactggcagtgaaagcacatctgacaatgctgccagtagtccgtcgggctcggttcagacgagtcagacgagtcagactgattcggcaacgacctctaccttttccccggcctacaattcggcaggatcttggaatatccctagtgttggcttaattggtctcttgtggactgctcttgtgccactcctctagaattctctttttactgcgtttggttttccatgtcagatgtgtgtgtgagatatttggtcaattttggaggtagttggtggatttattagtccattttaataaggatgattcaatgaaaacgcataaaggtcaaagaaaaacactaactagggtaactatacattagtgcttatatcatgtttttcaagtggctatgatattcgaaccgcctttttgctgttgtggtctcgtgccgatcacatgccgctacagtcttctactaattgctctctttcttaggaatacacaccaccattcctggaaaataactaggtaaagtgagtgaccgcacccctgggataattgtgtactgccacgcgacaccgctcaggaaccttggaactttattttggtgactagtctccattaggaaatcaagagtataaggatgagagatttgttgatgttcagattactgagtacgggaacaatgagattggctcttttatgatgtatgcaaaacctttcacaattatcggatgatctgagccattcgaagcataagtttctcctatcgagcaactgcttatatattagcgtaggttcaatagcaagctgaacatcggcttcttactagcttctgttgattcaaatcgacactaacgctaatcgacttggacagatagacaagacctctcggtgccaatttgaagtcatgcttctccttcatctccttcaacgtgatgggcagccggagctcacggacagtaaccatttcgtaagcgaaatcgtagccatcccagtctttgtgcttattgttgaattcggcattacccagcccgttttcttccagtggagcatcaccggcattccgcgtccgggcgaaccgtgtttcgcagacatgggtgatgctggagtgcggagcagtccgataaaaccagattcgtttcacactgggtctgaggcaatattttcgaaactcgtagttctttcttccgtcggcgatttgagtcatgtaggggtcctgcatcggtaggatgacatcgctgtgagaagggcatctgaccccagtctttgcgcgggacatgagggaactgttctgcgaacgtatgggcaaaaataagagggagattgcaggatctcagatcgagatatggagtgaagcataaaagttcacagtctacatatttatctggagtcgtacaagggatctgtatgcgcctttcccattatcgagggtcatgggacttagcatcggctggtggcaggaatcttggcagattagcaacaggttgaagtgactttcaggcacctgctaccgactagaagccttggttgtgcagactgcatcgtcatctatcgatttatctttcttaatctcacaaatagatttgcatagcaaaatgagatggatgtattctatgatgcaagaaaattcgtgattgatcgtcaaatgcctcggaatgtggaggcggtgatagcggtcaggtaatatccaatgagagagttatgccccggtcatctcctgcaagtggtcaccacatatccctgaaatggccaagcagcgcttgtcagacattctagccgccgccgatgtggatttgaacccttatgaagctctttacaagcatttccatacgcatcccgagctctcgctacaagagaaggccacatctgaaaggatcgcctcccatttgtgccaactcggatcctatgaggtccagacaaatataggaggttacgggctcgtagggactctcaagaatggccctggaaaggcaatccttcttcgggccgacatggacgcgcttcccgtcaaggaactcaccggcctcccctacgcgagctcagtgactatggctgatgcggacggcaatgaaaaacccgtaatgcacgcttgtggccatgatatgcacattacatgtctgcttgccgcagctgaagtcctggcccgtacacggaatgcgtggagcgggactttaatcgtactcttccaaccgaacgaggagcgcggcggaggcgcccaggctatggttgatgatggactttattcgaagattcccatgcctgattacgtcttcgggcagcacgtcatgcgaatgcgagcgggaagtgttggttcccggcctggcacgatcatggctgctgccgatagcctgaagatcactctctatggccgcggtggtcatggatcacagccgcatcagacggtagaccccgtactccttgctgcgcatgttgttgttaggcttcagggcattgtgagtagagaagtggacgcgaatgatcttgctgtcgtgacggtcgggagcctgcaggcagggcaaacagaaaatatcattgcggaccgggcggaaatcggaattgatttcaggactgtcaaattggagactcgagagaaaatacttgctgctatcaggcgcatcgttgaggctgagtgtgttgctagtggatcgccgaagccgccgttgttcacaccaacgaggcggttcccgcccaccgacaacgataaacatgtggcctctcaactggctgcctcttttgcagaccatttcgaagactttgacggcgataccccaaggaccaatgttagtgaggacttctccacgttaggtacttctcaggggcttccttgctctttttggttcattggaggaattgacccagggctctgggataagggtcagaaaaacgaaattcccatggaagagatccctgggaatcattcggcgttgtttgccccagtgatccagccaacgatgaaaactggggtggatgcgttgtgcatcgcggctttgacattcttgaaaaagtagccgtggctctccgggcctccctcgacgggttggaaacgtttagcactgcatgtaatgaattgcttgcagatttgattgggaattctcggttctatattgcagtgctaattgttgcacaggtatggcctttttgcatagtgtttattttattcctctgcaatttcactctattcattcccaatccacaagttgtggaagaaaacctctttatttttgatttctcgtccctcacatcaattttcaaagccagccaagaaagacaccacagcagaggcaaaggccttagaatcatcatcagttcccttacgagcatccccaatctgctccaagaacaacgccaatttcgactcatcccatcccaggatcggcgcagattccaagcacatattggtcaggccaaagggatccatttcgtaatgaccctgcacagagagtaccctgcctgggtggtacagtccctgaatagggcagattggagtgcttccaatattaatccacggcgcgggcagcgaaaccggcggcgactcggcaagcgtaacaacagttcccttcgcaaccgccatcacccgatctccatggaacatctgaatacgcaaccgttccttaggaagagcaccgagtgcgcccgggaacaacttcacaaaggcgtgttccaattgaacggtggtaagtccgacctcacggccgaaagggcatttctcaacccagacgtcgtggactgggtcatcaacgttgcggacgagagcgtgcgagatgagctggtggccgaaacaggtgccgaggatgcggacttcggggtattggttgtagactgtcttgatgaatttctcgagcacttgcatccacggtgactggtccatttcgcctacgccgggcgttccgccggtgatcaagactgcgtccactgggtatcgtacgggtatatgatccttgtcttcatggccgcggagagtgtataggtcgggataatggcctcctcggatatcaaacggggtgatcttgacttcgagttgctctttctcggggagcagggtttcgttcaggtgtgttgcagtctcgcagaggatggttcggaagtgggcgctcaagagtcctcgagcctcgtatagtttgcgggctggtatgtcgacgtctaggacggcgatatggatgaggtgaaccattttttcaaaatgtgtgtttaattgatggagggaaaaggtgaaatggagatttcgcacttgggcgtactactacataatataattttcccatactgactccgacgcagaattagacaacatttaggtaagacatagctttgtgggatatagtaatctatacaatataaggaacaaacgacacccagttactccaacagactccaaccactaccgaagtattaggtaaaagctaacatcgtcactcaagatgaccttattttttttcttgatccacaatctctacattaattctaccgaaaataacccgggtcttttctgttgaactttgtacagtctgtcccgcgtacaggatgataatgtgtgataaatcttggatttccacgtgtctcgattgaaactgacagatttgctatgctctgatatactctatctcatttctgatgtcttccacatgtgtatatgaaatatgccgagccgaatcggccggttacgagcttataaaggcttggctttccttgccgctttttgccgagactcggaagcctccgagtcttacataatcattagcatccccactcacagaacagcagccaagtcagcaaatcaccttgactataaaagggatactgtttgaattatagcaccggacccaagtttgaaattggacctatacatgtaccttgtggactaaatcctgtccgagttcaacggagtaaccttggaagcccggagttcccagaagagcggtgaggatagtaggcagaactatattcagttaggagggtgcacctgggatttcaggaaggttacgtatacctccaaaataccatgttattgctatttacaactctttataattatcaatacttgtgtcctaactcactatacatggctagccaagttgtcacatagtataatttgttcgaactctgctgcaattgattattatttgttcaagcctatcaccgcactaggaagataatagtatgcaaaattacagggacaagtaatagtgttgccgagcaatcgatatatagattaatcagaatcggagctatttcttggatcgctaaattacaggtagaatttcaaattaggaagacatatcaatcatcttgtcagccgtttcgagcaaagtgtcggccatgacatccatcttagtatcaaagatgtcaatgcacgactccttttcatagatcgagcagtaagcaccacggaagctgattattcgagacaagttagccggatatcttcctcattcggagcaacagcaaaacttacccagctttaacagccgcgctcacatcccacatatgcgccgccacgaaccacttatcatcctcaggctcaaacttatccagcataggctggtaggatcccatcgagggtttgaccatatcaagcggggactccctctcagattcatacttcatgaactgatggcaactgacgaggttctcggcgggcatttcaaagccggcgcgcttgaagtagccaccgactctttctgtgtcgcccgtggtcaagcaccagatggtgaaaccgttcttcctcaatttctccatcatggcgcggcagtctgggcgtagttccagcttcgaataggcatcctgacatatgtccctttcctcgtcggtcgcgaaggatctcggattttggataccggacagatataagacacggtagaagagcgccttgaagactttcttgtatggaacgcatcgcttggacatctgaagcatcagagactcgagctcggcggcttgcatccaggcatatcctaaggcattggccgacaattggtttgctcgcagtcgtgggccgaggatgtcttcgatggtgtcgataaagaagtcgaatgacacgcaagtgccgacgacatcaaagacggcatgcttcctgggggagactgtgttgggggaaatcatgttgtgtatacaagatgttgactgatgattgaatgaaattgaattggcagacggaagggattcttgggatacatattgcccctggccttctcatggtcatttatttcaatgcccttcgccaactccactggcaaccatggttcaatcattgtctgactccggcacaccgctatccgataatctagataagatcgaggtctactccgtgatgcgtagacagtggcggtgtgggtattccactccggggctaacgatatctggtaatcagctgtcaccggaccaggcccactccgtatccgaactccgtcaggcgattgcattgtttttgagattcaccggagtctctgccgagaaccgagatcgaaggaaagggggagcatctggggtatcaaatctgaccaagtcgatgttgcaacgaaaggtgggcgaagtagaaactaatgcgactttgcctgggatctttcagctataatttaaagagtcttggtagtttgatatgaaagagctgatatatatattacacagtttgaacagaaaggctggtggttcggggtaaagcgagcatatggcattaggaatacacttattctcatacttggagcagtctcaatatatacaatagattactattcataaactcaacacatagaatctctgggatacatcgaattcattgttacaaaatatctctcaaagtcaggtagatttgaagacccgaagactaagctaagatatcatactaatccacgctcagtcccataaaatgttcagcttgcgaaggcctttctttggttgtggcagcggctctgggttgcgattggcaatatcaataaacggttgaatgggtatatcttccagggggatgatctttgtcttgtgaatcaacttgtacgcaaaataaaagatgaagaagagaggaatattgatataagaggagacgaatccttcgtcgctccattgccctttgataaaagtcgagtacccgccggtgatgagcaggagactgagcatgatcaacgaggcccaactgatatatggctggagcggcgtcgcccacggtagagacttgcgagagattccttgtttcttgcagccgtaataaaagcgaagatacgtgaccaggatagtgagccagttggtcagagttgtgatggagacaaggtcttgcagccaatcaaacacggtgttggcagttgaggagagcgacatgtatgccaggcacatgaacagaccgtagagcgaaattgcgacccagggaaccgagaatctgttaagtcgagtgaagaacttgggggctttaccgtttaccgccagcccgtacaatactctcgaccctccgagcatgttcgagttgcctgaagaccacgccgacgtgatgatgacagcgttgatgattgatggcaccaccttgattccggctagggtagctgcgatcacaaagggagactcggaagctgtgccactagaactgctgagtctaggttcattggaggggaccacaaggccgaccatgaagattgagatgactaaagggaagacgtcagatttgaaggattttctatcttttagaatcaacataccatagaaaatcaatatacgaaagaaaatccgcttagccgcctgcgggatagcatgcctcggcgattttgtctctccagcggcaacggtaattgtttcaatccccgaataggcataaagagcactattcatagatgtccaaacaccgagaaagcgaccaagagagccaccgatgccaaggtactgaacgaaaggcccagggtggcgccagtattcaaacccgatggttttatggtcaggaccgccaccacaggtaataacaagagcctggttaatccttgttagcaccaaagccggtcaattcagtggcagaaacttgagcttaccattagattgactccaatgatcagcaagatcttcatcaaggagaaaccgaactcgagctccccgtatactctcacaaaggccatagaggtacacagcatgaccactccaaagatactgatccaaatcgcgctattgaggtcagaccagaactgcacgagcacagcagcggccacaatctctgcagggatagacacaaggtaggaatataccacgttgtagccgttggcaaacgataatgccgggtcaacaaagtattcggcgtagcggactattccaccgttcaaaggaacaagtgtgcccatctcgcccgtcgcaagggttacagttccagcagcacagcccatgaccaagtatcctagaaaggcacccaggggaccagaacgtgagattgctcgaccagaactgaggaagagacctgttccaatggtaccggccaaagcaatcatttggatgtgtctctgatgaaggccttgcttcaaggccgaaatctcttcgaagtctccgacatattcatcttctggttgaacaggcgactctgggtcgtgtatcatggtcttgacgtctttgtcgaattcatcgacagcgtcggtggaatgatcgttgtgaaaggtcttgattgtggacatcgcgattgacttgtattttctcttcttgtaaaaaaaagaatgtcggcaatattgggccgtccttgctatatggcgcagacctatgtccggggatgattagcctcgacttatagttcccttattagtggccagatggctctgaagtcaccgtgctaagcgacacattctttatctgtacacttaactatgcggataacatgatattgaaattgacgtcgagggtggccttccaaaagcagttagagggatgacatggagaccttgattggaagatacaaggttgccagggcccaatcagcaggtttgagtatctttgagacaaacgttgactgagggatgtgagatagcagcgcacgggtgatagatggggtgacgatcaactccgcagaactggaaggccgtaaaacccactccgtgagatagtaggaagctccgagagataagataactatcgtggcatgacttagaatagcggctcggagtaccaaataacgagtacgtacggagtaatcagaaaacgttgagccagatagacgtgctgggtgtttaactaatatgtcatttttcattcgtctggtgttacaatgctatagagtacatagattgaggattaaaggaactttttgcaggtcatcactgttatatctcgaagaatggagcctttgtttgtataggttgtacaagactagataatgataagaacagtcaagctgcataactctctcaatgtgcaatatgcaataaatatatctcaacgcttgatgccgaggacatcacccccgacaggaccgttcctcgccttctcaagcctctcctttgtcgactcaaacaatctggggataccagtatcttcaaacttgatcccattccgaaccatcttagcaaccccaagggcagacaagaacacctgaggcattccatgaccattgaagcctgcgagtacaaactggctatcctctccaggcacggtgccgacatgggggtgggaatcccagctgtagcccatgatcccggtccaaactttatccactttggccccgctgttttcccagccattgaaaaaccgctgcataaaaccatcgtaatggtctttgacctcctcgatgaggattgaatcgtccacgctgttgtaccatgaactcagaacagggtagtaaagcaagttggcgccaccgacaacaatgctgccgtcggcgcgagggatgagatatgaaacaacgttgtcttcttcgcggactatgtaggagttattcagcagaggcgctttcgtgccctcgggaactgaaatatgagtacactgtcctttgcagggaacgatggcttcgcggtactggggaagaagacccgcgatgtaggcattgttcgcatacacgactttccgagcgacggtcgtgcctcgtggagttgtaataataaagctgcctgaagattgccgactcacagacgtcaccggggtattagtctggagattgaccaagccagtcttgaggattgaggcggtcagatgcataattaatttgtacggccacagacttgcggctgtgaaagaagcagatgctttggcacctttgacacccgaaataccctccgcattcttgccagacacaaagaagacatctttcatgtaattcagatcacgggataccagcgcgtcatacatctgttcggccttccgggcagtttcctcgttggtccacacatcgatagaccttgtgagggtaaagtcacagtcgattttctccttttcaaccaaggactttatggcgtgtatatgtgcgatttcgaactccgttacctccagcgcgcgttcaactcctgctcggtcgatgagcctggccatgggggtgtacatgtcaggccgtaggtgaccaccgttgcgtcctgtcgcacccgaacagacaccccgtgcttccaggattgtgacagagagtttgttgtcactggcctctcctttgaccaagtggtacgctgtactgattcctgcatagccggcgcctatgatgacgacgtcactcgatactggaagctcctctgtggtccgatggtcgtgcagttcgtgaatgtctcggtgccaaaatggcacagttgcattttcgacgggttgccgggatgcattagatgagtcggttggagacatagtcatcggagtagaattgattgttgctgtttgatttggactcggaggacttgcgcaggttgatgagtaggctagtcgatgacctgctttgtcggcattaaataatggccggagtatcaggttgtttgatcattcgatgaggacactttagcaaatacaccgaatgaagataacgaactccgattcgtcggtattcaataatgactgatcaacgccgtgtctgcccttatcaacccccgcaaaccccgtgtcgggcccggcgtagtccactccgaaaggccaaaaagaactccgaaagctgacccaggggttatcttatcagtttgcccctttgacaaagcatagtcaaaggctttaatgtagtcaacaccgatggcccggaaatgtcggtccgttgacagtgctcaatacggaaaaggtggattaccttggtcaagccaaccaccctgagtccagtcaacagtgttcagccaatccatatcatggaatttgttcatctctgggtcaatatcctgctctctgcctatcgccataggtagattttgccctggagaccgctcatcttgcgggccatattgtctcagggactgctgttcgcctggcaactcttgtgcttgcatgccacacgatgaccccaaagaatcaaacacagcgtcgatgattctttgtataactgtcttgaacttcttgctaagctgcgcattattatccgtgggacgtatccagtcaagtaacgctctgaacataaccagaatctggaccacttccgaccgcgagaatttaacacagttgctagcggcggacgtcgatgtgagctcgttttgtggcgaagatggggctagattacttgctcggagaagctcgacgcatagaattcccgcacagggcattgcgtatgatactgcctggatggattcagttagtataatattctcaattcagaacggctaggttcgtcaaagacttacaatccagtcaaaggcatggtggaattcctggagttgatcgcgcttaagccaaagagacaggataacagacattgtctcttgggcgatgtcaaacaagtcttggccaccgctgaattgccgcgatacaagtaggcgctggaggaggaactggcattgcaatacgtcgagttgtatgcgggtgataatatagacttcatgggcgcttcgttcatggcattgtgagcttgactggggccattcggagtttctccgatactgaatgtgcggaggatatgaagcaactatcttccccaactgaacttgtagatttctacaagaaggtcggagtcagcgaaatgtacctagtatgcaatattgcttctaataacgcactctacctgcgatttggtaaattccgaattgacactaagggttagttccaagattccttcccggataggactaagcatggccagtgctcgaagccaggttgttgtgaatatctggccatttgtgttccagccattcgagtcaagctttgcaatagccagggccaatctttctcggtccccatatacatcttcctcgcttaaatcgagtgggagagggcattggcagtaacgattactgagcataggtggtcgcgcattgaatagactgtggcatttgtcgtggtaatacatcgacgcagcgagtgacgctcggtgttgagagaacggggtgatttcctttgcaggagtgaggcggtggaatcctgcgcttataaaagcaccgcggacagtcccgtagtcgactcgtacacggtcacctatcccgagatgagctctattctatactgccagaattcgtcctgatgtttgcgactcactctcgtcgctgatgatgatgctttgtagtctggtgctattcttcatgcaaataaccatggtatcactgatttcaaaattcccttcacaaagccttatacaggccgcagcacattctctcatcttgtctgcggcggtgtttcgattccgtccatactgttcgggtagatcaaatactggatcccactcttgcttgcatctgaaagcaattccagcccagctgaagaggatcccaatcatttcccatcgcaaatgaggcccaccaaaccagttcatccaggaaggatggtcggaattgcctgcgtgatcacattcaggtgtcgactgagaccttttgtgattgagaaatagatcatttgccactctcaatactgattcacgtgtccggagctcacccagcgcacttgcatattctgtccatacttgttttaaacaccgctgaatcattgtgggcgacagccatacatcgtagatatgatgaattccggccatcagcatgtcacatgtacgagcagtggggaagttaagtagtgttctgaccgccagttccacacgggacctggccgttgaatcaggctctcggcctagctcgcggtggctggaatttgtggcatcgaacatcactgcgccaaaactatcttgattttcaacaaaaacagccgagaagcgggtcgtctcgtgttggcccagctcctcttgaaatagcatgttccgttttgatgcggtggaacgggctgttagccccgagctcgcggcggggctgggatctgcaggagagagtgagatcgctgccgcgaccgaggattcagtaggaatctggaaagcgctagagacattttgagtggtcagtaagtcggcgggcagtgttgtatcgaagtgtatgggggtgtgagaagtcggagggcgacgtttggtcataggagcagggtgataaatgcaattcaaactgcgtaggacacatcgcgaacacttcggacttgcatggtcacagcgaatcttagccttgcgacatggttcacaggcttgcggttggccattatggcgttttcttggttctgcgagcatcatcaagtgtagttccccttaatatttcccagctcggtcatccatgcaaataccagacatgtctagaggataataagaaaacgaagtatggtcgtagaggagattaccagccccaaggccggtggattaagttcggctctatcgcgataggggggatattcacttgatgtcagccaaccagctgcccaggacgagattatccagattgcgtaataatacggtcattattgtatcaaataccgctttattttgcgtcgatcacgatcaagtgtctgtaagtttggtaacacactgtacggaccggtgaactagatgttctgagcacggtttcttcataaatagtggagtcggatttgtccggggtgcatgaaagcctcagatgaagagacagtgggcagtgaaggatattcagagtatggtgtctcgttgggaagagtctggtctgttgtgataaacagagtagacagatacagacgagctgatctatcagattccgcttattaaattccgctcatccctctatggccatatgcaaagggaagattctgtagcatcggcggacccgagatatccgaatacgattgattagccgaatagggaaaagcccgacacttttcttgggaagggcttcacgttgaacgagtctaactaacttggcctccttggagattatatcatcattgacgtatctcctagctccctctgtttcccaccacatcttcacctccaaattccacaacatgacccgttcaatacccctgaacggggccaaccaaatcccaatgaaagaagatacccttagacgccggaatatcaatggctcgcaagtcgagacagttggaaacggccataccagcccatcaaagtcagccccgaagccccaaaagccgccctcccttctccgtcgcagcagggagttcgcgggtaagcacacatggacattcccattagcgctcatgctagccatcctctcggtatatgcgctccatccgaccgagtcgaatccaatttctcatttcatattcctatcttacaaagagccatccctggatggcgaccggaacgccccggcgcagtatggcaagggtctgtgggacatagcgttcgtgtcattctacgtcatcgtgctatccttcacgcgcgaattcatcatgcaggaaatccttcgccccttcgccgccgcgcacatcaagtcgcggggaaaacagacccgcttcatggagcaggtgtacaccgcgatatacttcggagtactgggtcccgtggggttgtatgtcatgcgccagacgccggtgtggtacttcaacacgcgcggcatgtacgagctcttcccgcacaggacccatgcggcggagttcaaggcgtactacttgttcgaagcggcgtattgggcgcagcaggcggttgttatgttgctggggatggagaagcggcgcaaggacttcatggagcttgttgcgcatcacattgtcacactggctcttattgccctcagctatcgctttcactttacgtatatgggcattgctgtttatatcacacatgatattagtgatttcttcctcgccgtaagtcgcattcaattcttctggtttccgacaacccgaatattgacaatctcccaggtttcgaaatccctccattacatagccccggacataatggtgcccttctacgcaacctccgtcggcagctggatatatctccgccatgtactaaatctccggatcctttattcccttctaaacgagttccaaaccgtcggcccctacgagctcaactgggagactcaacagtacaagtgctggatctccaacatcatcaccttcgcactgctggctgtgcttcaggcgctgaatctgttctggttgtactgcctgctgcgcagcgccttcaagttcctcctgacgggggagaagaaggacgatcgctccgagccagatgagtctgagattgagcaggaatacaaggttggtggggaaatcaatggccatgctttgaatggcagtgcattgcccaatggcaagcctcagtgtgccgctgatggcgttgatatctctgtcaaggcgccctaacgatgctcgtgtggctttttggtccttcctgtgggtgctcacactgaggagccacatattcatccttctcttaccttgcattgcctttgctgttcaacgattttgaacaaaagtatttgctcaatctaatccatcatgttgccatgtatcatggcgattcgattttctcttctctgtctgaccgttgctgttgcgatgtctcacttcgtacgattagatgtgccatacgatatatgataataataatttagacttgaactagggtttgatcatcgctggtcacatagacaatcattccaaggggtggtctgcaaattgcagaaattatatacgcaatcaaggctatgcccgcacctcattgctcgcgccgtatgggcaaaacagtttaaacagctaacaaaactccaaggctatgtgcgaaagtgtggatctacaaaatgagatatgaacagttttgtatcacagcataatcaagaaaaacgcaggcccttgctaggatcccaggttcccgtttgaggggcacgagtgggctgagtcggggctggtccagctcctgtgcttggagtggcattcggagggttagcggcagatccgaatcgaatccccatttcgggggaccacatccccggcatacctcctggcatgctcggcgtagaaaccggaggcggggctacaggcgcgcgcactggttggggtgccgtgagagggggtgctgtctcagctgggcgtacggtgtgaacgggtgggggtagttgtgatggcacatggatgggctgcgcagctgagtaggcggagggagagtgatgggtccgaggtgactcctgaggttgttggcgcaggtgtggctgagaaatatgcagtgaggccatcgctgcggtattggagatgtctctggttcggggaaatgtaacgtcagtgataatccgtcttagtaatgggtgggtaacacatacgtttccagctggcttgcctccatccgacgttgatggacaaaaacctttgcatcgtcgcggaatcgggctacaatctttgccagatcattgtaaaacttgcgcccgacgtcgaggttggaaatgatctccttatacttcagatatccattttccagatcctgcagtgccgcttctcgttcctttgtcgacgcatcacccttatgagacccagtaaatgtccggttagcttctcggacttggtccgaaagttgatcttgctctcttcgctcttgggctagcatctcacggtccgaatcgtatagcttcagatgctcctcgaacaaatcctcgaactggcttgcttggataggctgcatggggaattcccgctctagtcgagctgtctgtctcaaaagtgccgggtctaaatgcgatccattagtccagttcaagattaatggaaaagaaaatacgtacgaatatcatccgcgcgacctttgtccttcaaagcttgaattcgccgcctcctccgattctccattcgagtgacctcgctcaagcaaccgcgcaaccggttagcctcgcgctcaacctctggtggaatgacaaccctccggctactaggcacaaaggattccaagtcccgatttgtaccagtgagaacgagaaagacagatcgtgaatctcgcagcttgcgctgcacgaggtcatcactgccctgggcggatgtgaaatagccgtcaatttcggtcaaactcctgtagagcttaggcgcggcggattccgaggttccgcgggtccagcgatcggtgccgtatttatggcgagccgcaaggtcctctgccttttcagcagctagaagctcaacaccttcattatacacagccaaatcattgcctttgactctggcggtgtcgtcgatagaccggtgcaagcgattcaggccatcttgctggcgcatttcctctgcgtgcgacacaagcgttggcgggagacctaatggtttttcgagcgcttgtaatgaccctggcaaattgagcgatgaaagcaagcttgaacctgatgttagcagaatttcccttgggtgtggtatttccattgaatacatactctcgcaacttgtcggacatagactccagctctccaatgagagtatcattgaccagtcggtctcgacgatcagtgtagatactggcggcaatgtgaactgcatatgggaccaattttgagaacagcggctgccccaacggaccattatcaccaagcatagagatcgcatcggtaacctgcgaaggtgccttggcgagaaccatgctggcacgttcaatagtcttgagctcagacttgggcggcacagggttgatgtaaatgatatcgttatccttctcggcacgcttgaggtcttccacgacacggctcttcaagccattcaagtcacccaatacagtccgattaatccaccgctgctctttcaacccttcaccgacacagaccaaacaatcgcgcagccgagcaacctcttctccatatttgcgcttctccaggcagtcaagcgcctgtcggaactgagcagcagcagcaaagtggtggtgctttgcagtcatgtggtggatccagtccgtgctaattgcattagacttcacagccaagtcacctgcatccccgtagaagtcagacaccttggctgccagtttcgcaatagatacatccttcagtccatctttaacagctttctgccagaagcattcctggccctgtccgagcaaaagaagttccaaactctgcagggtcacctcatccatatcctctggcggcgacgttcgaaggtctgggatgatatcggttcgaaggtggctcaacactccggcggcggagcagaggtagttacacgcctgtttgagtccatctgcggtagtccggttggtcgcatatgcaagctgggagtataatgcggcaagattgaatatgatattcgctagttcgaagcgcaggttattttgtgagactagaagccatgatgtatttctattaatctcgtgaccaccaaatcggacctcaatccaaaaaaaaagaactcacctggtcgcgaaacattaaagccaaaagccggataccacgaaaaatccactccgacctaaatatcacgccgaccgtcagcttcgaataccaaaatccaagagccaggactagaaaaaatgcgcacatcaactgggaacttcccacccagccatttcagctgagccgcatatgtgaccaggcgactgatgccactgtaatgcggttcctgaacattgatggcttcagttcgtagacgatcaatgatcatcagatcctccgcaaacatatccgggcgttggtcatatttggtcgatatgtattgggtgatcgctgcggaaagcgagacgggatgggaacgccgaaacgggagctggagaatattactgtaggaatagaacagaagaaccagtcagtgtcattcctctcttctcgcactcgctcatatgctgctgggggtactcacgacgccattgtcgctcgaggcggggtttggaagagtccgtttgttttgactgcgggaagttcaaccccaccgggcaacggaatgacgcttcgtggcctgaggcatcaactcaatacttggcctggttaaaagctgtcttcgacacttaagtcttacccctcccatttagcgcttgctgaatgtaaggaattgactcgtcttagtatggactaaaactattgcgcattccgtttccgtcaggcaatgaattaaggagacctacacctatgactcctcgctgagaataggccacgaccaacgcgcccattattgttcctcgggcttcagtgttgatctacctaagtagactcaaaagctgtttctttccaggacaaaaaggattgaacaatatattcttgaccctttacctgaggcactatttccaacgcctgtcattcatcatatgttctcagaatggcgacaccaatgcctcgattcttgaccatgtcgcaaatccgaagccttcatcgcagatttggagtcccccatgcccccctcacccagatagctatgctggaatctgcagtcaatgcgccggtgaataagaaccactatgagaaggatcgcgatgtgtttcggctggcagcgatcctggccgaacggatcatgcagaaccacgcgtttcaggatgggaacaaacgcactgccctgctagcggctgatattttcttgagggttaatggctattccctccagaggtttccatctgcagatgatgcgcacatcgagggcctcgcagccgcgcatgttgcagtcgtcactaagaaatggaccgttgaacagctgtgcaactactaccagtctgtcgcgctgtctttaacctagttcatactgaggttagacagtactacgctgcccgccgaatagcgtgctgaagataatatcccctctagttctatgccacttggcagcacttggctgactcgatcggcaaatccgggccccagctgtctatgtatcagtgctagactgccgaagcagaaactgaatttgtaccattgttagtcctatttatcacaactcatacatatttccgcttaggacggtagtcgtagggctcgtattagactccgactagcggggaaattaggttaggatatggagacgaggataactcggcgactccggaatacaacacattcttggccaacgtataatgcacctatatatggaagagtcccaccgaagccaaaatcctacgtgtcgtgggagaaaaagcagtctagatcggtcttatcccgacaccgtatagctcacgagtcacgcacaggttctttaacaggtgggaaaactaatatataggcttgcccgggtttcccgatagccacagaaaccttcttagataccaagtcacctttcatatcttaggtgataaaatccgcagtagtcttctaaattcgagaaccttgtgtcccaaagtaccaggaaaggagcgagcaacattgctattcatgagcaatctttccatcgtatctataagataggcacataggataccaagacccaaataggacaccgatttagggttttttcctacttggcttagaggtgggggatggtcaggggctgatctctacaataatcacatattctttgccatctcggcctcagccaaacgcggctagtgtggctacagcctctcaacctcctaggatattccctcgtataccgctgagtcatatacctttaaggcgtaaaattcagacatctgcatttggagccagacagatcatgatgataagatgttagacaaacagggggtccgtgtcagacatagccagccatggctaggcgggacatggggtgcagcaccatcgcaagaactattaattgctacgctatgccattttgggatcatcattaggctttgttgggcagtactattgagatcgatcacatatactttacaaggttggttagtagacctccctagcttttaatagccgctttccccctctccaatagagctatcgtgtcgccctccatcctatatccaactttattcaactccgctactctactctattccgacctacaacctggtgcaaagcgttcctgttgtgacaacactgccatgacggcacgacatcgtatgttaccctgctaagtagcttgagaatgcatctgactcactatatactagcgtatcgccgcctggaagtgcctgatggagtaccattcgagctgaaaccctcgccaggcaaaggatggggtgcttttgccacaagacgcattgaccgaggatctctcatccttagcgaaaagccaaccttcgttatctggaggtctcacagagaaatcacggattatcatgttaatatggcgattcaacaactgttgcctagtcagagagtacaattttcactccttcgcaacaatgggtcaagttggtttacaagtatgaacgaagctttcgctgagaactcgttcaacatcggaagttcagaccgcaatagggccgaagctcatggccttttccctcttcactcgcgcttcaaccactcttgtataccgaactcgaaaattccaacggttaatggcgaggtcatttcaagctttgcgaccagagacatagaagctggcgaggagatcaatttctgttataataccgatttcgaaggaaagactagatatgagcgtcatcaagccttacgttttacctgcgattgtttggcatgtcggcctggcactcccttccaagaacttagtgacatgcgacggcgattgatccgagggcttcaataccttacgcgtggcgtggacttggatgggcaggctgagggtttgcatcctattattgtcgactcgacattgaagtttgtcgcagagactttcagcatacctctttcctctagattgatttatactcttctgacaattttctttctcgaagaagagggattgctagatgattttatggacgcaaggttaagaccgacattaatcaaaacggcgcaattgttcaagtctgaaagcaataaatgcattgtcaggctagctatggaacagaaaacctgggtaaagaaattgcaagtggcattcacactatatggccgagaagatgctgccgattatgaagttgccctagcgctacgccgattgcgcccgttgttttaatggtttccctttctttcatatttcaaatgttgataattcattgtgctatttgataaaaaagagctttaagctcatccatgtatgtgtgtggataataaatacgagaaaagacctcgggatgcagagtaagacgaaaatccagatgttcaacgcaaagaaaatgttcaaaaaaaggactgccatttcatcctagtatgattgcagccttgccaacggttgagtttaatttggcagctcgtcaatgcgcattctgatgtattcgaaaatgctgagcaggatcatgttgttgacgccggtccggataagaatgatggacaggcccttgtacatgccggatttggcaacagcttgtgaggcctcaccaatctcactggcttttcccagcagaacactctgtgcgcgagtcttgcgcgtatccagaggataagtctatgagtcacattagtgcatgtcccaaaacagggtatcggcctgatcacatacgcagaaccagggcacggtgctgcaaatggcaccggcaatcataggtgccccgaaggggtttttgtcttggcccaactccttggctgcgagttgcttcacagtctcataaacaccaaagtagagtcctgagcccacggtgtcgcgtaacgcatgcaggcggaaaccggtgtaaaggccccaaattccatatcgtccatagatcttcttgatggcttgaacggtacccaagcgaggcttgtcacgcagagatcggtctcggactgcgtccggggcagccatggcgcggtgagacactagaactgaagtttgaacgacattcttcgccaactcgaaggggcctattttaatgtaagcgcggctcctctcactcttccatgtatcaatctaaacatacaggcaataggcgatgcgaccaagccagcgatgaggcctgcagtggtgaaagtaagaacacccgtcacggtggggaggcttccaggcttgttgtagttatccaaagggttagaaccagttacgcgttcgacgttatcagcgatgatgtccttgaaggcattgtatacggtaaagttgacgacgcggactaccgtgacacttgccaagggtggaagggcgcctatgtgatggtcagtcgatccttcagctaccgacttagataccgacttaccagcgacatatccccgaggcccttcagtgacccagagatagcggacacactgccatatgttcttgaaattgtgtctttcaaactaatcagcatattaatcccatctctaaggtcatatcgaatactcacgtctgcatccgagtcttgacgttctctagaggagtctgcccatcggagaaggattagcatcattcgcatctcatattagtcgcaaataaggattggagtgtaaaacaaaagctcgccgaatgagacactcaccaccgacaatgtagcgcaaatagtcgacacccccgatgcgacctgggttttgtacttcttgaggagtctgttgcgtgtggcctcatccatgttccaagctctgtgatcaggcatgatggcggttcttgtgtggtgagttgatgaaaatatggtacatgttcagaactgtttagttaccccgaaactttctccattggcagcgcggcgccgagaaatagctataacaatggttctccgtggaaaagcgttttagtttgcacagactctgatgctttcaggctggggaacccgatggaacgcaaagcggcctctcagaactagagtagaccgttcagcgtcccacagttgaccattaaacagctcgaccaacccagtgctatcttcagtctgttgaagagtaccccagcaggttttcacagtataaattggtgcgtttagatccgatttccagattatgagatagattcgatattagtggccggtacaatgacggccacggcaatgggtgcaaccccgcgttcacgcgttcacagatggaatcgaggtatggtgcagaattgagcggttcaagtgatgttctaagagagtcccctgtctcagccagtcgggatattcttgcgcaaggtgtatcgtctatagcaatgggttactaacagtgatcgcgagctatgagaagacgatcattagcatcaatttgctttccccatgtttctcgatggtaggacagaacggattgtgagtattcattttcaagaggacaacttacagacgatattcccctattccaccagacaaactgtgacctcaatactatgtgaagaaaagaagagggaattgctgcaaaatggcatgtggaccgagcttagctcaggcgctcaaaggggtttagggccaaacagagtgacgtcgttgtgaacagaacaggacttcttctgtgaatactggcattgtttgaacattcgcattgtttaattgactacttcgtactttgtatgtatatccatgcagagatcatgatcatattttatcttatttccagcctcggcaccgccgagggacatttaccggtcgcggtctgatcatcacttctttatatttcgtgtagagataggtagagacaagcatgatactttacgatgtatggagtacttaaagcggggagatcatcgcaggttagaccatggatcatggtaatcagtgcaatatatgtggaggacggtactccgtgacgagctcggggccccacgcagggattagggtcatgaccacccattaatcgcatcagtcgaaaccatggaattattgtaacccagattacagcctcaaatacaaacattgccgtggttgggtgatgctgcagatcattgagcaacacttcattgcctcccttgctagggctagaaggattagctggaatgtggctcatagaacgtccatatgtagtagtcaaaatatcaactgatcgattgcatgattgtcgacgcctggctcaaactgtgctaccagaatcaactagattagaattgaagagatgaattgtaatagtaaccttgtgattgtctcgtacgtcccggtctcttttcacatgagatctctactcctcgtctgaatagattcctacttatagcttaatttggaggttattatacttaaaattgtcaaccaagttccaaagagtattgaggtaatcgagtcacctcaggcaatatatagtcacaatgcaaaagtttccgttaatctgctcaaatatatatatcgactacctcggccctttctagtcgattgaatcataatattcggccacttatgcgaccttgtcatgtcattttggtagtcttcctagacgtcttctttatagaccccttctcacctttttaaagtttcctaggtagactacaattttacggaaacatttgcagtagcactgtatatccatgcagtataagcttattttacattcggccgatctccgtcatagagatgggatgataaccgggattgaatattgacctcatgtacacacatggtacgggatgcatacttgaatgttccaaggttgttagtactagccttgaattgcttaaagatggtatagaatacctctgcaatccaatgagcagagattgtaacgatatgttgtgtcactgttgccggaagaatcgaaccacagcgtcaaatgacttgtgtgtatccttcaccctaccatgggatgatcggtggcggagtactttgccggcatgaatcaggcaccaatagctgaaaatcaggcatccaaccctcttcggttcctcgggacctcggtccttccccgcaattttatgttgagctctccacatatcccgccgattcttatttatgaggcctcgcttctcgagtcgaacctataccaactccacctaaatttatctctgataaatcaacccacatatacaccatgggcaagaagcaaggaacccccgcttatgtactgggcgttggcatgaccaagttcatcaagccacgcggtaaggtcgactaccatgagctcggctatgaggctggtattaaagccatgctcgacgccaagatcaactatgacgatgttgaccagggcattgcatgctacgtctacggcgacagcacctgcggccagcgcgtcttctaccagttcggccagaccagcatccctatctacaacgtcaacaacaactgttcgaccggctcgactggcctcgccatggcccgcaatatggtttcccatggtgttgcggactgtgtgctggtcgtcggcttcgagaagatgaaccccggtagcttgcaatccatgtacaacgatcgggagaacccaacgtcactgtttgggaagatgatggccgagacgcgaggtatgacgaacgcgcccggtgccgcacagatgtttggaaacgcaggtagggaatataaggagaagtacacaacctctggagtaacaagaaaggatatcatgctaacatgcgaaaaacaggtacggtgctaagaacgaggacttcgccgagatcgcccgcatcaaccacgagcactccaagcggaacccctactcgcaattccagaccgaatataccctcgagcagatcataaacgcgcccatgatctacgagcctctgaccaagctacagtgctgcccaacctcggatggcggtgccgccgccgttattgtctcgcaggagttcctcgatgcgcgtccccacctgaaagaacatgccattctcatcgccggtcagtgtctagccaccgatgacgacacagtctacagcaagagctccattgacctgatgggcttcggcatgacgcgtcgggcgtgccgcactgccgtagccgaggccggcgtgaatgtcaaggatatcaaggtttgcgagctgcatgattgcttctcggccaatgagatgattactattgatgcgctggagctgagtgaacccggccaggcccatgagatggtccgccgtggcgatatcacgtacggcggaaagatggtcatcaacccatctggcggtctcatctccaagggtcacccgcttggtgctacgggtattgcgcagtgtgctgagctggtctggcacctgcgtggctgggccaacaatcgcctggttgacggtacttccgcggcactgcagcacaacctcggtctgggcggtgccgttgtcgtcaccgtctacaagcgtactgatggcaaggccgccacggctgtgacatcagacgtcgttggcaaaatcaacggtttgggctataacccagctgtggaggctaagggcttcactgccgagcaggccaagtccgtcgtgagcaagacgcacagctctcagtatgccctgtcagatacccaagagcgggtccttgccaggttctagaggcacagctaaacaccgttttggccaagcaatttgtacataactcaaccagactgacatgaacgatatccaatttttttttaaaatgcaccctaatctatcccatctatatgcccaaaatgttaagattttattctataaacaagtttcctaaaccgcaaaagaaatcatgaatcatgaatgcgtcttctcccaatcctcggggagcctgtagtccttcggcacagaatactgccctttacagcttcccggaccccggcacttcaaatcacacttgccatataaccgacaatagcactcagcagcactaggacaagaatcgcgattcaaccggtcaagatcaattccccgttcaccagcatggtccgcaaaaagaatgtgccaaatgtacgaaacaatccgcccggctatacggtcatcaccaggcgcagccctagactcccgatacacattccgcgaaaccccatcatcactcccatccagcagccactgcctcagcgcaatatactcactctgagcatgctgccagatgcgctcgcgggaaaccacaaactgcgcacagcactgcgcgcgaacggcatcctgccgaccaagataaagatggacagcactggtaatctcctcgacacgcgcatcagcatccccgccaaagatctggccaagcgcctccggcagtgcgagatccgatgccgagcgcgcactccacggcgacacggcgctcgacagcctcgtctcgagactgccctgcgcgggcacggaagaaggacacgtgccggcgctccagtcgcagcgcaggttgctgtacccggctttcagtgcggcgtggatgtccaggctgcgtaggagtgcggcgttgtcgtagtccgggatgtcgttgtgccaagcccagcggctgccgtgcacaaagacggcgccggcggagggtatgtccgcgtaattatcgattaggaaggttaagtaggccattgcttcatgtccgcggtttgcggggacttggagcagtttggaggttttgtctgccggcgcgtccacttgatacatgcatacatggtactgggtgcggagcggctctagccaggacgggtcgccgtccgacgagacatgggagactatcagggctggtttggttgattctgctaggccggggcaaactccgcgggcttctgggatgatggatgaggttgtttggtagcggactttggtccaggcaaagagtttgtccttggttgattgcgggcggtttaagaataggatgaaaaataagatgcagagaaagaagattagttggataagtgatctttgtacttttcggcccatgtttgtatattaattcatgcaattatatgtgtcttcatttcttttgcctccgcgttgatatttcagatatttcggatcatgcgggaatgttggtgccttaggtgtgaatatcacccctatttgcaagatctgcacgatctgcaggagaagtgccgagaggtttagatgtggatgaacatgtgttttattttggctttacccttgaccctgttatgtttggcgttcattcctgcggagtagtgtcatctgataagtggttctatatatattgtactatcggcctacagtgacaatcagatattagaaccataggagtccttgttgtctcataagtcaggacaaatatagccctctaaaagccataaatagagactagttatggtttttattgttgcctagtggtaatacactatattattttccacattatgtcttatttttctgtcttcgctcttgctttgatctcgtttcaccaatatccccttatagtaatttgctaatacctcctttctcttgaaaatgtctgataaattgctactatacagagtataaagtagcaacataatcatgccacgcccaccgcccacctctatcgttgctcgattcctatgagagacgttgtacttcctcgtgcttatgatcgtgctttgtcattcgaagtacgctttaatcttgatattggtgtgtgcgaacagggcagacagaatcatccacataaatccagagtgcgggaatattgagttgattggatttattgatctccagaacttcgagtcagaatgaatatttgaaaattctacatcttagcatgtatccatatttccgtccactccatttatagatttataccctctttctccgtagatcattcattgagtagcattgtcgggatcatccttcctagagtctttttgaaataacaacctgcaatttcccgataggaaccgcagcaacccattctcgtcgtgggggaaggattgcttcaacatcgttggacttttccagttgttgaatatgatacttttttaagatctgggagacagataggtaaagttccaaatatgcgaagctatttgttttctgggtcagcaaattgaaaataactgtatgtgcacgccaatatcagattatcacctactgattgccaatacaggtactgggacccttggaaaacgggatataataatcgttgcgcagaacagtcgagtcttcactctctttctcgagccatcgatcaggccgataatagtaaggctcagggaaagcagtctcatcatgtaggtaccagataggcgagctggaaatcatagtctgcaaattattagccaaataacaatacttttttggtaagggggcttacaccgccaggaatatgctttccagcaagcaacgatcctcccgtcggtacaattctgggtagcatggctgatgccgctccagtccatctaattccctccttcacgcaagctgtcagtcttggtatagactcgagttccgtcatatcggtggtccaattcgcagccttcaagtctgaaacaagatcattttgcaaggactggttgagggatagtgcccacagtatatgcgcgagcgtggcggaggttgtatcagtgccagggcctaacatctccttgccttctgacaaggcagactctggagaaattctttcccccgccagaaccttcagaaatgacgcctcgggtgctttttcagagtctgttgcaagtttcagctgctccattgcccactggaatactcgttaggatttcaacatgggaatatctttgagcttttggttatacgcacatcttcaaactccttgcttgaggtcgatgggccaccccagccggtaactcgagaagttacttcacaaatcctaccatacattctcattatagtgggaaggttggtgtgctgagaacttatatcagcgtgatctttagtgcaatcatggtacataccagtgacatttttgatgactttaggtcgttttctttgatgatttgtagttcttttcctcccatcaacgagtcaatggacccaatagagcttccaaacgcgaatcttgctagagacatcacgtcaaaaattcgccgtggtgatttaccggatattcacttacaaacaatgtctgcttcaagggctcgacaggtagtaaccaaatcgaaaggtccctggcttaatttttcaagcaagatattaaatctcgatatctcatctaccatcatctgcgtgagaaggggcactttgcttcgattgaagagaacacccatgtgccggcgcctttgtgcatgttcttttgggtctctatagaagcaatttagtaaccttctattcctcgtcttgataattcactcacgtaattgagaaaagagctgggtgtccatcttgaacgaactggctgtagactcgaggatccttgacaaatttactggctggcgcatgtacgcgcttgtaaatatcgagcgagtagaaagatacttcatttggacctattcgaaccaaaggaccttgaaagtcgtgagaatttgtcccaagattgaagtgttgcttttctgtcggccaaccattcttggatccccacgtttgaaagatagtaaaatcagtgttagaactagaacttaccaagccgcttgtgtagctttggtagctccaaagtcagatgtccttgatattccgtggggaattcccatagtaagcgcgatatcggcgcaagtagactggcgtttggaatatgcgacagaggagaaaagaagtacgtatggacaagctttggaaacgatcagttggttctcttaaacagcagtcttaggcctcttagcatacccatataacagctaccagagcactaagaatgccccaaatcaggaatgacatgatttctagaatctcacttcacgattttcaccgataaccaaagaagttacagatgcctttataagaaacaattatatacggtcggccctaagcaacacatcgcttgtacctgccgtattgctcgatttttcccgttgtagtggttttgcgccaggataacaccaccgcgaccgtttgtggcataatctcgcgccattcacaattttcccattgaagagccgaggtccacatttgtacagcctaaaaattctagctctattgatgtcgaatcgtgcgaaagctagtaaataatgtgattgtagtcttttcccctgacttcctacttattctactcgggcccctggtagaatcgagtcaagaaccatacacaatccactttcgcacctcgcagccatggatgatcttaagaatactgaagaatttttggcgcaggaggtgaatgccagtgatgagaatactttggtatggtatcctctatgtgcaacggagatatagcacgaattaacatctgttgtctctcataggagcgtctagggtataaacaagtgagtggaatgatataaatcttcgattcgagaactatatgctgacttgatacttcccgacataggttcttaaccgcagctattcactttttgagaatttctcaacctcgtttggtatctattgctgcgcatggcgtcttgttcttggtcactaactgtttctattagctgctctatatttcgtcggtggagttcgtgtgacattcacgacgggtatcgcagctggagggccactggcttattggtaatgatcccgaaccgattcaagcgcaataaggtggctttattaacctatatattaggacgagttatattataacctgtgtgtttacattcatcacagcagctgtgatcgcagaagcgtgttcggcatctccttctgctggttcgatttatctctgggctgcggaggcaggtggtaaaagatttgggcgactctttggcttcgttgtagcctggtggagcacaacggcttggacaacattttgtgccagtatgtctcttgcgtgtcattgttgtccatatctgaactgactgattgacgaatgataggcaatacccagtcagctgtgaactacatgctttcggtgggtatcatgttgttatatctgacagtgtcaactctgaactaatttgacttaggaattgactgttttcaatgtcgactttcccaccgatgtctcaaatatcaagtttcgcgctgtccaatggatctgcaccgaaatcctcctggctttagccgcattgatgaacctcgcatctggtatgtacactctcatagatggcctagaatgatgggctcacctcttaatcttggcctgcaatgctgattcaattgtacagcgcgagtattcaaatacgtgttttggttctcaaccggtgctgtctttctggacttcatattgaacgtcgtctggcttccaatcggtgcgcacaacaccttcggcctgcggactgctcatgaagctttcatgactacatataacggaacgggagctccagctggttggaactggtgtctttcatatctggccacagcaggtattctgatcggatttgatgcctccggtcatgttgccgaagagacgaagaatgccgccgtcaatgccgctaagggtatcttctggagtacaatcgtcagtggagttcttggcttctctgccgtgatcttattccttttcacatcggtaagtctattcaggaacttttatatagacccataaactaacaattgccagccgccaatcgatgttcttttctcatataacgcaccccaacctttcgtgcccttgtatgctgcacttctgggtgaaggcggacatgtttttatgaacgttctctctgtcgtagctttatggctagtatgttttcgattgctctttcctacaactgacaacaaatgctcgatgtaagaggacatgctaacctatctgatagaataccgccatcgccattacagcagcctcccgtcttgtcttcgccgtcgcccgtgacggagtactcccactatctggatgggtatcgcgggtttctaacgagggtcaacctaggaacgcagtccttgttgtgtggggtgtggccgcgattattacctgcactatcctgccgtccggagtggcatttacttctctggtctcagctgcgggtgttccttcagctgcggcatatgggctcattagtcttggaaggttgactttgacctcgggtgagaagattgaggctaaatggtctctcgggcgactaagcaagccgttccaactcatatcggttttgtggaacggttgggttgttgcggtactcttctcaccatatgaattcccggttgaggcctcgacgctaaattgtaggtgtcgtcttgtcgcgaaactagcagccattggaagagactttgtgctaatatatttccagatgcgccaattatcatggctattgtgactatcttcgcgctcatctcgtggttcttcactccagcgacagcgtgggtaccgcggggccggctgtcccaacctgttgcagatattgcaaattgaattgctggtttcattctcacaggtcgaaaacatgaatgtgtgtgcgatagagggtcgcaggaaagtattgcgagccattaattgttagatcggttgattccttccttcattattcgaaaccatgtttctatccatccatggatatatatcgcccacctgcactttccctgtatcttcaaacacattatgcaacatttatcaagtcacagcaaaaaagacttgagagatttgacagcccattagattcccaagttgacaaattgaaatcgcaacacagaggttgccagatcagccacgtgaccatgacataatccgcgctactggccccgtcgaataaaattttgcgatccgctttctcttttcctttcttcttcacttcaaaacatatacacggtccccaacacactcttgtcgatggaacaatctcactctatctacatatttcagtttagggacccagaccgaagaatgctcgttctaatcccgccccctgacatgcagccagaggggaacgggttcgcttttgagccaacattcccaactatgtattgatatgaaccttgcgatttagtcttgcagacttttatgcttttgcaaccggtgtttactcgcagggggggggggcgggtgggnnnnnnnnnnnnnnnnnnnnnnnnnnnnnnnnnnnnnnnnnnnnnnnnnnnnnnnnnnnnnnnnnnnnnnnnnnnnnnnnnnnnnnnnnnnnnnnnnnnnnnnnnnnnnnnnnnnnnnnnnnnnnnnnnnnnnnnnnngtgtttactcgcgggggccagctttggctggccctgaactcttgatgttgtgtttcaaccctgcgaggcatatgttcttgcaacttgcatggtcatttcctccagacagggatggccatattcgcgtctttgatttactaacacagctagatagatgtagaaagcattggcatcttcgaagtcttgtccgtcatatcttgatgtttgaggtcaaaaagatgcctacactaagccctcacagttggatacgtccttctggagactcccacttgttacgtccgctccctctatggggctgtggtgtcaaaagtaggggagatacattccttgtaaacagctataaattttgaatcttattccaaaaagcttgttactgatatcggagaaaacacaaatatgctccgtcgttgtggaatgctgtagatctgcatctcacatcagtccttgctagggactcgcagcaacccttcatcgaagacctacttcgccatccctgtgagagtatttcccctgcattttgagtagcaatagggcatgactgaagttgtcaatagaaagctcgtgaaacctgcacagcgcctcagaatctgtttgaccaaagccagcatcgaaattactgagcgctcgctcgggtatgacggtcagacttgagtatgaaattcttgcaactctgagacttgaacatggaatgcgacacgattcgtcttgaggcgtggtccgcatagccttggtcgctttttctggcttttgttcacgattcactatcatcggatatcccttgattgatcccacaccaatcattggctccaacagatatacttcatagtagatggcgttaatgcccatacaatctacaaatcatcaaatccctctctcccgaaacagccattgagtatggccggaggcctgataaaataaacaaggtaatactattgctgtttatcccagaaggagtccgaataccaggtgaagacgcgcggtagctagtcgtaacaagactcttcaccctagccccccttggccttccattccctccatgatgtggatcgaaggggctgcatataaatcccacgtaattccccagagcccagggctctgtttctctcagcatcttgtccatttgcaacaatcactcattttctactacattcatttgaagacaagtatttggacatatattcattccttctatctataacctacttaacatacatcaccattcccaatggctcgtttcagtctctccttcatctccatttttttggtccttgcggtcttcgccctctccatgcctaccaagcgtgatgagcaagctgctactcaacctttcagcctcgatggcactctcaaggaattgatggttagttagctatgtcaaagttcctatgagaagttttttattaaccaatgaactcagcatgcatctaagttgatggatggtcttgacaacaaggatagcaacgaaaaggataatgacaccgctgaatccaaggcgcagcagcagcaggccagcaaggaggaggctaaacagggggaggccaaggttgccgcgaagctggccgataaggaggcagctggtgacaagcccactgccacccctaccaagggactttcctccggcaatttcgtgaccccaactgctactcccacccacaaggcaacatctcagcctaacgccttgggcagtcttcccctcatcggtggtcttctcggtggtgctggaggcggtctctgatttaccaatgatcaagcccccatgtattaaactgaatatgagagtgctgcagactgcgatgaacgcaattctctcttggtaaacactggctggtcgatattcgcttttttcttttatgttgttttcaaggggaatggccaatgagatccttgataaatttcacgattaatttgatatgattagttcaataatttgtccgttatgtctccttcccaacctgtatttggtaaaaatgtatccttaaatgtgcttgttcaaccaaaacaccttccctctcattatcagcccatagtcgcatcatgacctctggtcgcggcttgcctgttgttgcccttcatgaagtcccgtatagtagcccgcatagtaccatgacatcatgaggtgcttcaacgactcatcttggactgcagatatatgttagttccatgaatcaccatatcccgaacgtggagcataccatttgccatgattgggtgaggcatcggcatagcaggcgtggaaaccgcaggactggcagcagccacgggttgagaaggctatatattgtcagcgagtcctttgtagaagaatacaacattaaaatggcaatatacctcgggaacaggctcagaaatctgctcgtcaacaatcgagacatcctcattctgggttttgttggcaccatcctcaacaggtttggtgctttgaatgtcactgtcatgtatagccggaacaacaccagtgtcttccgttgctctcaagacatcctcaacattttcacccttggcgtgaatgctccaataatgctgcggtcaggttagatattggtcacgtgaattggacatttggtgcctgacctggtattcttcgacagcatcgtcccaggactgaaccagggcagaatcatcccagacctctgcatgggtcaaggtcactttttttttattctttcccatgacgttgacctatttggcgttgtagtaagtaactagacatcttggcggtgactgtggttatggttgaggcggctcaccgccttccgagcaaatcagggaagaaaaaaaagtttcccgcagatgatcgggcagcgtacagtctcaattcaacacaacaaaacctcaaaatggctcccgataagagagtttcaaagcgcaagggtatgtacaatggttttggttggcgaaattctctttcctttcactaacgatactacagctgcgcctgtcgccgccgattcacccgccaaaaagaccaagaaggtcgaggctaagcctgatgagacaaccaaagaggctgctcctaagtctatcttgaagaagaatgagaagagcaccaagcctaaggcagagaaggctgctgcgccggccaagaccaatggcgagcccactcgccaggtcaagcctcgcaagcgtgctgccgacttcctcaccgacgaggagcccgaagaggcaactgcgcctgtgaaggccgacaagaaggccgagaagaagcctgcggctaagaagtccaagaaggaggaggtcgaggccgcgcccgcgcccaagaaggctgccgctaaaaagtctaagaaggaggaggctgaggccacccccgcttctaaaaagtccaagaaggaggaggtcgaggccgcgcccgcttccaagaaggctgccgctaaaaagtctaagaaggaggaggctgaggccacccccgctcccaagaaggccgccgcgaagaaggctgcccccaagcccaagaaggccgagcccgtcgttgagtccgaagaggaagatgccgaggaggatgtctcccctgctgatgagagtgaggctgagaacgagggtgatgacgaccagactgaggctctgatcaagggcttcgagagcagtggcgacgaggacgagtctgatggtgagggttacaaagagggtgaacctatccccaaggccccagataccaagaaggccgagcgcaagctggccaaggagctgcgcaagaacggcccccccgaggagcccggcactgtttacattgggtgagtttcgaccgtaattcatgatcattttgaaccatctaacatttcatttccagacgtatcccccacggtttctacgagcaccagatgaaggcctacttctcccaatttggcgaaatcaccaaactccgtctttcgcgcaaccgcctcaccggccgctccaagcactacgctttcattgaattctcctcgaccaccgttgccaagatcgtcgccgatacaatggacaactaccttatgtatggccacatcgtcaagtgcaagttcgtccccaaagaacagctgcaccctgagatttggaagggcgccaaccgtcgcttcaaggttacgccatggaaccgcatcgagaagaagcgtcttgtgaagggcaagacacgtgaccagtggtcgaagagtatcgagtccgagcagaagaagagacaggacaagcaggagaagctcaagaaggcccttggttacgagtttgatcttccccaactgaagagcgtcgacgatgtccccatccaagaggcccccaaggctgtcgaggccgctgagcccactgacactgccaccgaggagcctgccaaggccatcgaggcccctgctcccgttgaagcccctgttgaagctcccgttgaagcccccgttgaggctcctgtccctaccgatgatacctccaagaaggtcaagaagggcaagaaggagacacccaaggcggctgctacagagtcaccggctgctaagtctcctgccaccaaggcgaagggaaaggtcactaagaaggccaccaagacaaagtccaaggcgtaaaagggattatctgaaaattgtttctaatttcattcatcaagcctttttccccaaatgcattgtgtttttttcccttgatcaataaatttctttcagtattatcattcaaatcctaaatgcaacaaaagtaaaagtatggtagtcgttgatagggatgccggttgaaaggacttttctcttcgccccaggatattatctctgtctctctctaaaacggtaccttcctgtcttccgtagcagtattaaaattagcatttccccaggcgtttgtgctcgatactttactttctggatatattccttcggaacatagccctaagccgatgccactcgcgctagtctcaactaagcctagcatacatcacctgaccagtgcgagaaaaaataaaaccctctcctcgaagattccacttcttctttttcttcaactcctcgctcaaagaatcgcattcaaagctcacacacaaaaggaagcctcgctcccttttcaatctcgctttgggagaaagtccccggacaccctgcactttgggtaaaaccaaagtaccaagtcaggcaatgcggaaacgcgccgccatagaagcaattcgatagcggcttacgccctattctctcacggtatcccgtgccacccgacggttacatttcacgatgtctctggaaacaatggggtgcgtgctgggtactggaggggggaaggattggtggtcaaacaccttttcttgtattgggttgcctttcgtcatgttcggatagtcatgcgattgcctcctgtctgcttctttggaagtcgatggaggtaactcaatggggctcattcttgaggcgaggagttccttgatcttttcttttcaggagtctgtagcttatggcaaagcggtgatgagattctgtctcattgcagaagccctgtcacaggggccggactcttatatcttgccataggcttcgtttttttttgttcgcgtgatgatataccaatcatagagtcaagcacagagatcccaaggggttgttgacgataaacgatttaaaattatctgatgaacattctacatagccagcttttcagttcgaacagtttccaaaataccaatgcaattgaaatgaatgattaaaatgcagtattcataactaaatcgtagaatttcacttcgtatatataatacagccgttctacatgccacatagctaggctcttgttttttttgggggggattttttttcactgggccttgatgccctcagcaccgacaggcgcatcctccttgggttccttcttctggccagccacctgcaccagcagtgctcctacaagctcggcggcgaacgcaatgctagtcgcacagacattgctccatacctggatgctgacggatccaagcggggcgcgagggaaggacacgatccattcaacatagtaggggaaccaagcctcgggaagcgggaaaacaggcgttttcgagtaccagaattggaggaacatcttcaatccgtttgtgctgatccagcgggcgatcttgacggtccagtcgaaggaggactttttagaggtgagggtcttgtctagaaaccaaagtgttagcagtctgctcaacagatataacaacgtctcctgtagtcttgtagtagtgacacgtactcagcgcttcgtattcctccatagtcttgtcgtgtcgtcttctagccttcgcccacttcgcaaactcatcctgggagcttgtgctgttcatttcgtgtttctgctcgaggacctggcgcttcagctcctgctgcttccgtgcagtccgcgaggttgaggtcggcagttttagataaaggagccatagctgtgttgcaaagagagtaggtgttagcgtgtggaattacaatgtaggtgcgcggcggagctgggaaactatgccgaggccagagatgggtggattggagacatacaagaccatcgacggtactcgcgccgaccgtattgaccaggaaaattgcgacgtgcaagaaaaagactgtgaggacgagggacaacattgtagcggggactggcaagaccgggatgaagcgttgaatgcgacggcgcaggctaagggagcctggaagatagtgagagcggcacagtcggccgactaagtgagtgtctggtagctctgctggatgagattggaaatgtcctgacaagatagatgtggttgaaggtgtgaatgacgttgtggaaaggtggaaataacagcggactcggcctttccgccttcacagtatcacgcactacaccatcctgtctatcacgttgcctatagcatggcaagacaataaaatacagaaatattacaatcaaacaaaatatgatgaggctttgacggttgtacctttccatattcgccaaacaaccaagccctccgatgtccaacccgaaagatgcattccaggaacttgtccgcatcttctcatctagagacaaccaagtcctcgagatcgagatccttccatcaagcctaggcgttccgttcctccaagatggatgctcagtgggaataaccaagaaggtgctagtgcaggccttcacggtcgcgcgccaactcttcttcgaccgattaatgcccatgtccgaagatgaccttcaaaccacctttacgacaaacgcccagtccagaatcgcagactcggctattacagaaatcatgctcctctttgactgcgagcatctcacggcctgcaactggcgcaagcgccgactgcaggcggccatggcctaccctggtatttcaaaccagacctctgccgcagagttgttagaagcagaactcacgctcatgtcgagctaccaatgctcgccactccatcgacataccaagtcgccgaccctctggcatcaccgcctgtgggtggttgtctatctgcttcaaaaacggcattggggtcttgaggacctgtctaagctgcgaaggactgaactagatattgttctccgcgctggagagctgcatcccaagaactattatgctttcagctatatgcgacagttggatgttcttctcgctgctacagcgaatacacctgggcaatcgacatgggaaacccattctgcgcagtcagttgtcgaacgggtggttgattggtgcttggctaacccacgcgatatatcgggttggagcttcgccctctacatgctgagcaatgttccagagcaacagaatcgagccaacgctcttgagagagtggtcaagtttgcgcttaacgttggatgggaaggcgagagcctttggacgtttgtcgaccaagtatcgaggcagtttgggcttgaaagtgtgatcaaagatattattctgttgcactgcgatcaagcagccagacctcctgattgccaaatggttcaagacagtcgacagaagaagtcatggcagacctggctagcccgggcgagagtatgttgggtcgtagatcaagggcaagatacataaccggatatgatatggatgtatgtgtttacgcgtttacgattaccaccaaattgcacctccatgatatttctcatgtgtcgttgcctcgtttggttagcgctgtggtatacatgtttgggctaaatatgataaacgccaaagagattcaaatgaacgcctcgctagacacccagcccccgttttttgaaaatgggcataggcggatggttccgatcttatccataaatccagcgccgtccttcactcgtagcacactttgcgatgctgctcggtgggttgtccgtttcgggcgatcgcggaaaaggtggagggagatgagattgactgacggcttggatctaaggattcgggcgtgttattttttcccgcctgccgctgcctcggcagctctcttctcgtccgctgtagaagagaagcgatcagtaaaccagtctcatgtgggttgggcttgcgtctagcgccttcaatgatacacacccttcctctgcttctcgcgcatgatggcagcggcatcttccttggccctcgcgaattcgctaccggtctgggtattcttgttcttctgtagaaatggtcagtatgagcaaacagaagggggagataagacgaaccgaattgcccgccttcttcagggccttggcccgatcgttgtcacgttggttaccccgtgtcatgttgtgtgatggtgagattatcgcaagagtaccgagagtagtgagcgcgaaacgtttggagagtgagagaaaaaagtttggaggggtcggctggattccggcgaatcacgggggttccactcatcgttcagtataccttcacttaattgactatcgtgtttaccatcggagtaattcttactattttatgcctattggctaatttgatcagcgactatgtgatggctatgattgggctatattcttgccttgtttcgactctggctttatacttcaccctggcgcttcgcctaaaagcccctgtctaacaaccatatgctgtactcaccttggtacacgtacgatatagaattctttgaactatacccaacaggtaatcaggcttgtccgagataagcagtatatttctcctccgactcatattgtgcctcattttctcctcgtggtcactcgataagatgagacggagttccttgcctcctctccccttagcgcctagagaggcatgttactgcatatcctggaacattcgagatacagggagaacaaccgatcttttaggtacaaaagaaaacaaaacacggggaatataggggaaagaagggtgacttgtagccgccaactcgtttcagcatattcgaatatcctctactaaccaccagtcatttggctacaccgagccctagttgagatcccaatgctggaggagtaaataactagacttattctggctacaaccccgatcttgcgcctaagggtccctgtttattgcctgaatcgcaccaatgaactcctgcaggatctctcccactgcagagatggggtaaagagaaccctgccgatctctttgaccaggactctaattagatgcgcaccacttatgtggttcacgcagacgtttcaagtctattcatagaaaaaaaataccatcgcctttgttgggagtatacgtctaggctgctacacctcaatagccattcttccaggtgtttctccattgtcgcccccattcatcccgtttcctttgtctttgtgtttcattcttcttttcttgtcctcgagttgatctcgttatattgcattgttccattctttcttggaatatcaagctttctgctggacagtcgctttcttccctcttttaataccaaccttccccccaagtctgctagcagacatttctcgatacaccctcggcatcgagtatctaccattcttaacaagtgtagcaggctgtgcctcagttatgatggctcatttgcgtgaatccctggccggtccagggtacgtgatcctgaacgtcattcgcgttctcaacattatcactttcatggaccttatagctgcttgtgcagtacttctggcaaagatcgacatgctgaacagcttctttttcttcgaggccgtgacccacgccgttgtggctctggtcagccgtaagtataatcttccttttgtgttttcgtgatataaatgctaacgttggcagtcttcatgatcatctcggagctcccaatactccaaagctatttcgaccaccactggccgatgttcggacaagaatctagcttctactctctcggtgggatcatgatgatcctgggagtttcgacactgggcaacctgaacaccaaggctatgacccaggaaaacattggcctgactttctggagaatcatcatctccgccggcgtcctggcaatgatagttagcgtggtgaacgttctggcagtaagtatcgagatcaaaactcccagcgtatacccttgacccaatgctgacccatttccccaacagagctacatcttcagcgaccccgagaccggcgtcagtgcccgccaggtgcgggtcgacggcgctgttgcaccgcaaaaggcaatgagccggactagcagccaccgcacccttcacttgagcgtgaagcgcgaggaaaccctgcccacctattctcgccaaaaccccgtcaagcgtgccaccaagcgtctcaccggccgattcccactcaagatctccaagcccataagcccgacgcttgttgaggagaacgatgctgcttcctccaagtactctcgtgattctgcggagatccgtcctcccgacctcgcacaccaccctgctctgtactcgggccatatggtttgagccggttgcctggtcaactcggttgagaacggcgtttggaaggaaaggaagaaccgtgctgattgagtcagaattcctgcgttattgcgatgggcgcacccggcgctgttttattacccctggtctttcgcttcggcttgctcgtgtttaattgatttaattgagacatctttttttatgcagcattcgtaggatttgtagatattaaggatagatttgaaaggtaaatattccaaaattagaagagtatggagtagaagaagtgtaggttgagagggcaatgtctagaaaggacgggacccacgttgacgtttggccccgacttcaatgaagctacgttggacattcgaacactttaacacctttctttcttcgaatctcgactcaacttgttagagattccgatgaagtaaggtccatatcatagcaaatatggctccaatcgcaatttcctggggaacgtaagtcttgaagctcttcacatcctccgcaatctattctgaccgtgaatagcgtcaaatcagtcctcatatttttcgccccaatcatactcccacgcttaatcaccgcctatcgaagtctgcgcgtatccatcgcgagccggccaccgccgcgtcctctgcctgctgcgcccggtcgagcgctgaacatattattcggtggcatcgtcttcttcctactcctaagcctacccttcaacccacacgcgcccgaacccaacatcttctctcagactcgctctcgtctaaacacccctaccgatgtcatcttcaaccgtctcgcccgccttcggccagataacttcctcaccgaagccgacaatctcctccagtccaagttcacctctctgggtgcccgcaaggtatatctgacctatggccccgacgccttggtctcgtgccaatactgctcatttgacaacatctacacatacctcctctactacctcccattccacgtgttgttaccacacttggcgcacctgctgctcctaggtgtagccacatccgcgcccatcgcagggcgcgaggcttcccgctggcgcatcaagttcaccctagccggacttgtcctcgcagccgtcgacatctacattatggccacctacgatgcggtccaaagtgcgccacgctctgtgcgcgcgggccaaacaccgccctccggcatctacaaccatattacgctcctgcgcccgctggcctttgtaatctgcgatgtgatctgctcggttgtgctctggctctccgcgactaaccggttctttttcaagccgccctcgaccgtcgagcagattgacgaggcagtgtcgatggccgtgcaaacgctcatgggcgcaaactcgaaactccatgccgcgagtgttacccgcaatgcggtggttcgggattcgactttgaagaatcgcgacgatttgtattggcggactatggtggcttccgagaaccccactcaagggcctggagaaggtggggagcagatcctcaacaatatatgggaggaggaagaagttgctcgggctatgtcgcgggcgatggccggacatggtggaattgatttggctcaattgggggtcagtgccaatgattttgtgcgacacgttacagagggattagaatgaatatcttactctgtattcaatataatcgtacagcgtacatgtagatgtcattatcccatttctcctctcccctgccaagtgtcaataaatagaccgcaaatggtaaactgttgacaccaacatctatattcccagaattcaacaaaatcaaaatcaaaatcaaatctccaaatctcattccaatctcagctcgacaatttacgtgcatgcacttccatccaatcaacaatctcgacactcaacatttaacgaggcggtgagtggatgatcgtgaagagatgaaacgaaatcaccacgttccccctctattccctctcctacaaaaacattttcttacactcgcaagctgttgcttttcctgttcctggttgaacgagtcaagtcaagaagtaaataagggcttagatgaggcaggtcccacatctatttcagcattgatcactttggcttgattccccgttctcgactccccgactcccccgactcccggccctcttctccctcggtggaatttcgaatctcctccacactattggtgctctctccaccatggcagacacaattgtgccgtcgaaacaaatatcagagctcaagggacgcaatgcctacgtttcctctcctagtggtttacgaccggccaaggagaccacgttccgtgaatgggtggtcaccaaccagatcggtatgaagaaacaccccggtttttgaatttacatgagaatgaaggaaaagcaaagctgcacagagccgctgcgcttctaattgaatcccagcacatgcgaaatctaatacgagtaccgctaacactaattgcttctctgcaggcatctcgttgaccactctgtctatgttgctggctcttcataacctctacccttcactccgcccatatacccagccattcttccaattgtcctattacaacgaatcctcggactcctacgtccagggctgggatgatgtttacttcgtcatcagtgcggctatcgcacttaccggtatccgcgctatcgccattgaatggtgcatgcaaccattggcccgcgcctgtggtttgaagcgcaaacaatcggttcgcatcgctgagcagggttggcaagctatgtactattcgttcatctggggtgttggattggtgcgttcggcccgagatacctacccgggaatatataactaaccgctggttcgaccctacagtatctctggaagacgtcatactactggggcgatttcgccgccatgtggtcgcagtggcccgcccgtcctttgtcgggcttgatgaagtggtatcttctcgttgaactggcattcctcgtgcagcagatcttcgtgatccacgtggaagagagacggaaggaccatgtccagatgctttcccaccacattatcacctcggttctcctgagctctgcctacatctacgctatgtacaatgtgtccaatgtggtgctatgtctcatggatattgtggacttcttgttaccggttcgtcacgtactattcgccaagcgctgaacagctactaatacctccacagtttgcgaagatcctcaaatactccaagtttgaaacagcgtgcaatgttggctttggcctcttcatgggtacatggttaattacccgacacatcatctaccccatggtgtgctggtccgtttattatgatcttccccgccaacttacctatggctgctacaccggttcgacaagcgagttcatctcaacagaggcgccggattccttcgcatacatgttcggtccatacttcagtttggacaaccccatctgcttcaatcccgcgctcaagtggattttcttatcattcctgttgttccttgagggactgtctattctatggttcagcatgattgtccgtgttgcttacggtgtgatttgcggcggtaacgccgaagatacccgcagtgacgaggaagacgaagcggaagtcgaagaccagcccacatctcacgccccagcgcacttgactgccagagacggtgcccctaccgacgcactcgagaccggaaacgccccgggcttgggtcgtcggcggtccaacggcactgcctcggtgcgggcgcgcggccgtggtcgtgttcctttcgatccgagtgatcggaaggctctcttaggtcggattggatgtgaaaagcctacgtaaatgccggctttccatttatgattttcctttgaccaaaatttgatgactcccatacgagttgctccatagcatgccatgcctttgtcacataccccatgccgagatgtccatttccgggtgtcggtgctggccatgcaatggagtcccgaattacgatgaactgcgatttccaaggttagtttgcggcacatccttcagtctgcttgccgggtcttatatccactttgtttttgtttttttgatttcttattcatactcattgtcatgtcgccatttgccggctggtgtcggggggaagggggggttggggggtttcctgctgcgctttttgttgccgtgatgatctctacggacttggagtttcgctctagagatccacacaataataaccaatgaagcatttggccttgtacatgtattatagtgccctgtccggtacggacttatagatttttcctagagtgaatacggaatccagcgttgccttgaacaaccctaatccgcccatcacctagtatatagcaatctcgcctagtgaacatagtccctaagcggcggctcctcactcccactatacccaaacaacaacacattaagcaccccaaccacatccgacacagcctccatgcccaaaaagtcatccacatccaaaccaggggcaagcgactcaccacaaacagcatcaagatcaatcctctccaacttccccggcccctcatgaaccaaagcatcaacaaacaaagcatacgccaacggattaagcaacaaagacgaatgcgaatacaaaccgccagcagcacgccccgcacaagcaacctgcacctccacattcgacacgcccaccccacgcacatccgccaacgccgcagaagcccaccccccactctgcggttgcacaatggcgtcatccccagagtacacgctggtcgtcggcacaaacgccgagtccccatccccaccccgcagagcccgaataaaccgcgcatcatacccctgctgctgcacagcgggcgtacaaaacggctcagcgagcacgcacagcgtcgcaacaagcgtcccgtggaaatcactactgacagccatgaaatcgctgaccgcggcctgtgtcgacggccagtatttcagcgcccattgtacgtctacgctgccttgcgaccagcttagtaccccgatggtacgccccgagagtccggagatgtagtttatcgcgtacgcgacgtactcggcgttgctttggatgtcgcctagtgaggtgtctgggatgttgacccatactgggtctgtgtgtgggtttgcggcgaagatcttcgcgtagttgaagtaataggtgctgccggctgggtcggcggtgccggggactaagaggatggggattttgttgttcttgccgtaggaaaaagttgtcgggatgtagattgcgctgcggagggtgtcttcggggatgtcgtagggtgcgtccccgaaggattttgttgggtggattcggggactaggggtttttgtgttgttgttggctatagagtttatttcgtggtttcttatgccgtctattatgtcgaggatggttgttgggactagacctagggatactgtgtcgatggcattctggataattgtttggttgttgtgtggaattgaggcgaggaccgagaggccttctccgattgttgagacgggcttgattttgcctgttgctatatctgatatcttggcttcgagcttagatagattttggtatatttctgggctgaagggagcatgacttgtggaggtgttgaatagtctgttaaatatatctgagacatcctgggcttcttttaatatgtatgaaggcactgggctgccgagtgatgctgatatgaagagaacaaaccgaaaaagctgatagcagtgcattgtgaagcttagctcgattagggctgactatccacccgcgggggtgatccggtgaatgctgacattttatacaagagatatttcatcggagctcaatcatcatcactttcgtactatattcatggcttattagatctgagtttttatttcagcgccagatacacgtctatgtatatcggattccacacctcatatttcggggacattcaacgcaccgtcaatcttttgaacgtttgacatggaaaactctaaagtgcagaggtagtcccccataacgtccgagcaccggagtttcttctgtatctgtgtatcccgagatatataaatcagcccgtggagggtctgctgctacctccttcagaaggataagatcgacagtccacaccgacccatgactcaataggttatgaccaaaaggagcctatgttcaccgcaattgcatctcaagccgggaatcattcctaatctgttttgtgttgcaatttcacgtgtctccgccgaaaaaagtacaaaagcataacctggactaacttcagtttgaattcaaaacgaagaacactgcataaaattttgtattaacatatcaatcatccaggaccatgcacgcgactaccatagacgcgaacatgcctcctgtgggggtatataaatcccggggtctatttccaagatcccggcctcgagcttccagctgacaacttttgtcccacatgttttgtaaatcaacagcggattgcaactgagttgcaagatattcctgcaactcaggcacgggtcgtaacgagtaaggggcttcttttaaacgctgaatctcatggatggttgacgctagcatagtatatttttggaaattgatgagcccttccggtgtcatggctgggtttccgtcttcgataaatgtcaagtctttcaagaacaatcctgttgaatggttaatcatcggcaatttcaacggttcacgagagaactgaccaaggaaaggcacgcacggtgccattgcaacccgtaacgtgtcacggtaggcctggtaattgtgtgcgctgcatgtcatagcttgcaggggccttagagtattgcaactacgttcggtaaccattgcccacgtgcgggcaagccggtagatgggtgcgctttccatgcctgccaggatagagattaccgcggagtaattacggagttggtgacatgtctggaatagaacattagcatattggaataattacaagggtcaggctagagattacaacgtacattggccacattgaccaaatgccctatcacttgggtccgttttttcacatccgattctgcgagtattagggtgccgacccaattagagagctgattggaataccgaatcaaggctctgatgtttggagctagctcgggcgtattggagctgtccttcatttgccagtttttgtttagcaattcatctcgttgtactttgccgaacatatgtgcttccatgatagtcagctgccgcgcaatttccgttgcatcgattttgaggaattggagtttgtttaatttgcgtggtagaataggttttggtgggttggatattgatgatagcgatcttttgtggcactcgagacccgcaagtcggcgctgaatgactgtgagaagttgttgtacggcgcttgcctcggtggcatccgtggcgcgcttggcgaatgactgcagtattcgcaaattttgatctgtatcaatgccttttggctcagaccagaaatgttcaagccattgcttcagaacatttatcacgcgcaatcgtatcagtggctttatctgggtcgtccattctgtcgtctgggtggcgtctaatttgggaggcgagcagtcgaatcgatcgatgaggagctcaataagctctgctgcagaggtaaaatacttataagtggcgaggaagactcgattgaaggcaccgtcgagcttgtcgtggtgcgtcagattttccaccagcgctgcgagggttccggccctaacaacctccacgctgccctggtattggtagacgagtttctccggagatgtgatgtcgtgagatcccgagtccctccgctcttttgtctctgtctgatccatcgcgacgggacagccatggaaggatttaaatcaggtgtcattcgaaccgcacggtcgctgtggtcacatggcattgtgtctgaactacggtcgaggcaagaccgagcgattgataatgtttggctagtggggtactcccagcgtgctaacgaggcatccacttatagtactcggtagctctcacgttaatttctggtcctgcgaaaaaccccgaactatcatccgatctcggatacgatcagcaaccgatcatcggaattttgcttaaccgcccctgccacggaccgccgctaaccgctttgggccacgatcggagagttttgagttatctgatccgaaacttactgagaaccttggacgcgacatgtttattggtagacagaggatccgccgcgtcatttatttctctctcgtgccacgcggtcggagcccacatgtggaacttttcaaggctgaggccgtttaactgttcacgggatttatttgttcccgactactgtagcaaaaggtggtgggtatcattcagggtcgcgtaaaattattatctatactggttctaaaagaccgtgcccctgacctgccgctttttcttcagattgatatcctgcatcaagaatgtccaaggaatcgccagaactataatgccagtcccgacagaaagtagtcgaagttcggcgtaggcataggccttttggatagcaaacctggtggcagatccgactggatagctcagttgcgtgacgagatcctcgtaaatattgttcaaatttgacaattccgattccgggaggtatcgaagaagggctttcaggtatgtgttttgccagatgacggtactgatggtaagacccgcactatcgccaatagtgccaaccacgtttaacacggcgagtgctgtcgcgacatgttggtggtcgacagccgctaggatagcaagctgctcaacaaggatgaatgttgcaccaccgatagcgaggaagatttggcacatcacctggtagccaacattcacattaggctggcggaagtatatcattaagccctgtgccaacatgtagagcggaattgcaatatacaaagtccacttgtaacggccaattctccggattagccaaccagtggctagtagcagcacaccagagaccatgtcgaagatattgacgatatagttggacgtggtgatggataggttattgttgacctgcagccaggacgtgaagtagtagctccagcaatagttcgacagctgataggttgcgtccaagaggactgcaccgataatagtgcggttcgtaagaagtcgccactcgaaaagaggcactggagccaaccacctctcccaaatagcgaagaagaaaagtgtgcagaacccgacgacaagcatggcaataatgtagccggaagcccactcattgggggcgtaatgggcgaggtcgaagggaagctcaaataacacaagaccagcagtgaacaggaagactccaaagactagttactcccagttagagtttgccctctttcgtaaaggataggaatcaacaagtagagaacttacgatcaaattcgacagtccaatgctggatgctttcgaataccgtgcggccacttggtctcttgatccggtagccttctttctccgccttgtgcaggttgtacttcagcataatgtatagcggggcagctactacaggaacgacgattgcccagcagccaaagccccatttccaagaaatcttgtagtagaattcgtccgccaccttgggtcccgcaaatgccgtgataatgtatggggaggaagtgaacgcatacgcgaaagcacggtttctcagtgttgaaacgtcagctgtcataacgtctattgcgtattccataccgtagaaaccggtatagtagaagaccttgtatgcccgtcagcatccgtattcaacaccatgacattcttagaactcacgttggcggcgcagtagatctcaaaggtattgcaggtagccatgagaaccaagccgatggttaaacatataaccatcaacagaaacccttccgctcgaccccatacatccatcatttttgcgacagggaggtaggtggcagctgcaaagacatcacccagagctgtgggaaccgcggatagcgagtgtgctttgaatgaacttgtcacatagggattcagagtaacggtaatcgtagattgaaatgcattcgcgaaataaaggaaccagatgctattggggccctggtattagtgtatgcccgaacatttgtcaatggtatcggatacgcggcacaaaataatacagggaaacatacttgatgaagactgcgatcaatgtacctctcgaccaggtcatggtcacggcctcgacgtcttgaacaccatgctgcgcactcccatccggtatctcctcgagtgccacagaactggtgggactccgagtgccatctttacgatcaccgatcgtgttctgctgtgcgaaggagtcatttccattgtcttcggttgacagccggcggaacacgatacgtgctctgcggattaaagggcgaacacccataatggttgactttagaagtccaaagttgatcaggttgcactacacgtgaaacagtagggaatcattgcccttatagtaaacaagcaccgaagtcgggtttcgtatttttacggactagctggaagccaaccagtcaagtactctattcagcagggttgtggagattcaattgaatcatccccgagccctctccactggcgcttaacagaaattcaataaaaagaaaaagataagatctttcgtgctcgtgcgtgcgttcgtgggccgacccacgccacctttccctcgtcgatcggaaattgcacatcgtgcaccgagtaccgagtatccactgctgaatcctttcgatcctatcacaaatagttacatgattaatgcaaaggcaggaaaacctaaatcggggaaattcaaggcactttatgtctaagcgaggactttttcacgtaacagtttcgcccccaaccgcaatatgtacctcgcttctctagactctctgccaagagttgactaggcgtatagagccgatgaaataatgccattctatgaaggcattggctgaattgtgtgtacctgagcgtggaatatcgcatcgtttattttatttgtcctcgcctacctgccaatccttgtgcgacttccacaagtaccggctaattggctagtgtcgactatgttgctcccaaggtttagttttcaaaagggttagtcacgaggacaaatgaacattgcccaagctagtcaacaaagttatggagtcatggacctgtgtatgcgcgttcacagtcatatgtgaccatgttcagctcctagtcggattcccggatgatatcttccttttgtttgaaaggcagagaggaatatcgaaagagcactccgagggcaaggaagagcttgagaaattagctttcaacacatcccatataggaccgagttatgtcatggccgtgaactatcatacgttcttccagaatcttggagtcccgttagcctccggcggacacacagaatgggaggagtcgaaaggaacggcgaattgcaggccgaaacgcttttccacaatgacctgaaggacatcagtccatcggactgtccgtgtggtacgtcctcataaccttaacggtactattgtcgtacatttgttcatatcggaggaccgttatcggctcacatcaagtatagcgttcagtagcgggttgtagatgaggatgtcgcataataaatcttgggcgacaacaacaatatcgaaggcacttggaaatgaggtaccaacgtctcccatagtcctgcttcttgagaggccaatagctcgtcccgtttcatcgagccagcgagctgtatgtctgcaaactttcaaatctcctcagatttcaatatcggaaaggcaccaatacttggagagtatcgaaagcttaaacatggtatcgcacgtactttgaccatcgttggagatggattagattgtagtgagaataggacagggcaacagggaaagtagttgaaggaacctgtaaaagtggaaagagaaagcaaagcatcggaaatgcattaactacaaggaattcacgacctcaagtggccttcgtggtagaggcccaagtaagggaggcttggtggtggttgccgtatgtgactcgaacggttatggatagaggaaggaacgccggactccaataaatagctattatatgtacttttgagactatctgcatcaaatggaccaataatacttagtttatatggacgaatagatcctatgatcaaaagtcaagaggaacgtattggtataccatccgagaagcatctccagtcagaccacggtcaatcctggaaacccccagaaagaattgatcagggccccggttccacttcgcgatatctgcctctgtgattccaggaggaaacccatctattggccgaaaggcggaaatgggtccaatgcgcacctcctccgggataagcagtgctgttggtattctcggctccatgtccgcacgagcacaatatgagcttgcagcaagttcggaactggggattggctcttttgtggactccagtacacctaagtgaggtggatgatgggctgcgttcatttccattgcttgtgattcttctagctccatgattatttggcccacggcggcccatatgtggcactggtaaaaaccttgcactgagggtgcttgacggagtagagccagtgccgcgcgtcggatacgcggttcacggcatcgaagacttgtgaaccaaagcggaagaccgatattaatgtcaaatgtaaatggtggttgggtgccgtctgatcgcaccgaggctttaggggcaatagcagattgttcaactatatttcggaagtttggtagataagcgtcgaattgcatcaatgacgatgatgtgcaggtctcgagcatgacatgtaacatttcatgacaactcaacagaagggcactaataccaatctcttgcggcgagagaaggtctttggcccgaaggcttgtcatcaacttatcaaacgcagtatgccagttcctcagtcgggtggccagactggatagtatagtattgaattctccgggtagatgatagacatgagcctcgtgtaagtgcttggtgcatgttgcttcgaagagagggatctctacagctaatagcccgatcgcttcccgagcagatttgagtgagtcaaaccgttccgttgagaaatgctcggtgtcttgtagtaaagccgtcactggagccccacggacggcgagagcaaatgttcccaaacggatgaagaccgggataatagtatcctccaacaaggaagctttactcgtagcactagatgctatttgggaacgcaaagcggtaatgagctgcacaccttgacgataaagctgcaatgccccgtctgcgtttccctggatggcctcaatgcagatgaaaagcacacagctgatcagtccgacaaagaggtctatgctaccctgctcaatgcgctggcgaacagcagataccgagcgtgagtaccaacccaaggcatctgggttgtttttagcgagagaaataggattatcacggcgttgtagcataggtcctgagctttgttggggacactcgaatagggcactaatggtgatgatggcatcccaaacagcgggttcatagcggcaaacttgtgggacggtagtgcgccagaaatcaacatccaatccaccaccaatggaggaggcagcacattcgaaataatatgcaaatgcacgtcgctctcgccacaccgtattggtgtttgctgataatgacaatgggttgacgatgagcgaaattgtggaagaaggctgtatgccttcaaagtcacacttgcgacctgtactggtacatcgaacacagctaggcttttcttcgccgcatttgactcgtcgaattctacgacacgctcaatatcaaactctgtctatggaaaaggaagcaagcacctacttgcaagtcttgcatcctagccttgaccttggaaggactcctaggcgacgcgttgaatgatttgaaggaacagacatgttgtagcattctagattcggcttgcgccaacatatctcaacgcgcatattgatcaagtgggccgttgtcacgtgcctgatcacgagatcatggtcggcctgattcagtcgagcatttccgggaaatcgtgagaatgaggtcgggatcagatgggaatgagatgggggaaagagagctgactaggtttgtctagggcggaagtcaagcctttcgctttttggaaggagcaggacttgattgagagtcatgacagtcattgattattctgttttgttctgatatattacacctagctagggatatgggtattagtgggcttccgtgagctaggtccatgtctcggacacaggcaacttatcacgaccatgaagttgcccagcttatccaatttgtgaccactatgcacaagatatcattgcgtccttgtcccaataatctgcgggcgatggctatttgcaagaggtgtgccatagtcagtagtcggtgggcgggaatgaggtccatctctagaattcgggaacgtttgaaagtggatgtgtagtgaagacaagctaggtcggctctcaaccagtattatctctgagcctggcaagtgctgccgcgataccttcactcatctcttcacttggtttattttcagcctgaggctcagtagactgtgcagcgtgcgcagctgttgttttcctgctttccgctaaaacctcacgaagaatcgcctcctcttcatcctcttcatcgatatcctggtcgtttttgtcatccacattcacggctggcagtcgagcccgaggttttatggcaggagcagaagcccgcttcgcactctcgactctgaagtcttctcggactgcatgacaccattgttggacctttttctctccccaccccggtacagcgctaatctgctccggctgtgcatttatggcattttgtaaacttccgaaggtggagatcagactcgcggtatcggacttgttgatacttctgggtactgtgacaaactccaccagcgattctttatatgattgagcctgtttcgctcgaatggcggtgggctgtgcattctctgaggacttgtaaagctcaagataatgcgcagcctctggtgcggaccaacacaatatcaaggtcagattgttgatgatggatgttttggacaactctcggagattgtcttcatggtttggtatgtcgaccatcaccagtacgaggcggagattgtatttgcctgctaattgtttcactcgggcgtagatgtattcggggtgtaggcgatggtatttcaaggagagaaacattgcgcacgttgtggtgccaaccacataatctgcgggaatatcggcatactcccatggtacgagctttatatgggacaggatcgggttgcccttttgtcgcgcggacaccagaattgcggaagtagtaggacggttggtaagggcttggggtttcaactgttgaactttcggccttgacgattcacctggagcaggggagtccagagtcgcgggagtactagggcggttggcaagggcttgaggtttgagctgttgaactttcggtcttgaagatgcactcggagcaggggagtctaaagggcgagaggatataccactcttcgggcgtaagggatccatcgtgtgttgtttctaaaggcagagcgatcaattgagaggtgataggtcgataaagctattgcttatctggatgggacccacaccgcccaggccaatctgcctcgcttttttctgccgctaatttttttgttcttcccagaccgcagaaaaaaatcgcagtcgcaagaaagccaccatggttgaattacacaagaaacgacgtctctcggacgccgaaagcaccgaaatcaaagtcgaagccactacacccgccgccgaggccgcgtccgcacagaacaagagaactcttttcgtccgctcactacccacctcagccacgacagaaagcctcgcagaatatttctcgcaatcctacattatcaaacacgctgttgttgtctgcgacaaagagacaaaggtatctaagggattcggttttgttacattcgccgatgtcgaggatgcggagagtgctctgaaagaactcaatgggtccaagtttgacgggaaaatcattcgcgtcgactatgccgagtctcgtaagcgtgagatcgatgagaaggttggacgcagtgtccccactgctgcatcccgcgaatccaagaagcagaaggaagaagagagagggcagggtctgccacccaagctgattgttcgcaatctgccgtggagtgtcaaggagcccgaggatctgaatgtcctgttccgcagctttggaaaagtcaagtttgctactctccccaagaggaatggcaaacttgctggttttggtttcgttaccatgcgtggcaggaaaaacgccgagaaggcgctccagatgatcaacggaaaggagatcgatggacgccaacttgctgtcgattgggctgttgagaaggacgtttgggaaactaccaagaaggaagaagacgacgacgaggaggaggagctgaaggaagagaaggagtctgatgatgttgagatgaaagatgccgagggtattctggaagagccctcagacgacgaaacctcttccgacgaagatgacgaagacgaagaggacaatgacctggatgagctggacgacttggacgatgatgatgaggcagacgaggaggatgaccgaaatgccactacagtcttcattcgcaacctccccttcaccgctacagatcaggccctctacgaccacttcaaaactcagtttggcccgctacgatatgcacgtgtggtcttggattacgagaccgagcgccctcgaggcactggatttgtctgcttctggaagccggaggacgccaacacatgcgttcgtgaagccccccggggagccgaagctatggccccgaacaaggacaagcctaagtcaaacaccgctatgaagcactccgtcctccaagatgaaaactccgacccaagcggccgctacaccctagaaggccgcgtcctacaagtcgcgcgggccgtgagcaagggtcaagccgccaagctggaagaagagggagtatcacgccgtatggtccgcgacacagacaagcgccgcctatacctcctcaacgagggtacgatcccctccaactccccgctgtataagaagctctctccctccgaaatcaagatgcgcgaggacagctacaagcagcgcgagaccttcatcaagaagaaccccgctctccacctcagtctcacccgtctcgccatccgtaacctcccccgccacatcaactccaaggacctgaagcagcttgctcgagagtccgtcgtcgaattcgccaaggatgtcaaggcgggcgcacgtcaaccgctctcaaaagaggagcagcagcgatcccgcgatacaatgaaggagctagagcagctgcgcaaacaaaagaagatgggtatcgtgcgccaagccaaggtcgtcttcgagactcgcgagggtaccaaggtctccgagaagaccggtggtggtcgcagtcgtggctacggattcatcgagttcttcactcaccgtcatgcgctcatgagtttgcgctggctgaactgccactccatggcagtccctccttctgctcaagctcccgatgaccgggacaagaagaagagccttgttgttgagtttgctattgagaatgcccaggtcgttaagcgccgtaatgagctgcaagctaaatcccgcgagcccaggcccaagcgctcggatgatgccgaggacggagagagaggtcagaagaggaagcgctccgatactcgtggtggaaaaggaaaggatggaagggatgcacgaggtggccgagatggccgagatggtcgtgatgccaagcgcggcaagactggaaatggaaatgcaaagggccccaaagatgaaaaagtgacgaatgaagaggaggacaaggccgctaagcgcaaccgcattatcgggcagaagcgcatgaagcggaagtcccgcaaggggaattaaaggcgtgaatgttacatgtttacttgtttaatgtataggcattatttatcccggcattcagagggaagaactgttcttttgtacctacgcgataccaccaatttcgaaaatgaaaagcatggatttatcacactgggtatataatgtcgtacattctatccatgcaaaggcagccgcttaatggtaatgtagcccttaagtattcttggcaccttcaactttgccaacgatgttataccgcttgctgaagaaagtgtaccactcatccaagacggtcttgtccttgtccggtaggtcgtaccactcaggtacacagtcttcgggcttgagagaagatagggcaagagcacgggaggcgtccttgccagcgaagactaagaaaaagaacagtcagtttgattgttctttatagtgatgggataggtgctgtactcaccgcgatatgaacccgaggcaccataagccgaatttcggcttacatcaaagacaacacccttaatggcgaccagagtcgggcggttagggtcggaacctagtgtaagatagatattagccaatgatccttgagctgggcgcattgaaaataaggaattgccgggtgttgtgatctgtgagggataatcttctcgtaccgtcgcatttggccagttcctcgacggaaattgggtcgtccttgggcgggtccagctggactgctactttgggtgcgaaacgcttagattctccttcttgttcggtcattgtgattgttggaggtgaggtcgagggggaaaaacaatattggggtttggcggggtttgccgaggtcggtacatagccgcttcggggctgcttactgtggactacctgattgatcggttaatctatttaagctattcttattttgttgaagcctatgttggatatagggttagaggattcgatttattttctatatacggagtactctggataggctatatcgttaatctttgacatttccgtatataatgtacctcggccttttggacaatatatcctctccaggtttgacccaatcgtagaatctgcaatgataagaacgtgatcaattgcttattcgggtagattgatacctgcacatgcatataaacagaaagcttctctctttttgccctaatctggttagcacttgtgaagagtgctgatatgggaattctctcatgacgtcaaggtatacacaacatcaactgttagactgcttccttgacataactatcacttgataacacggcagagtgctgtttactattcgagataatcgttccccgacatgcatccacgttcaaacatactaccgacgtcacatgaagacccggacaacaccggaacccatagactctgctgctcagctctatcttgacgatcatgttgacttccaagttgactcgtaaaatgcccctccatagagtagaggggccatgtggagatgaaacggagggggccgtgtctgctttggctgtgatttgtccctttccggttgttctttagtttgtccaacccaaaagcgaaaacaggaaaatcctacccacctgggcttcgaaagaaaaaaaactcttcctgtccgctttctcttatcttcatttattctattcgtgcacttatttatgttgcttccctctttcctggaaatacaaagaccttcgaaatgtcacattcccctacctcggggtatggctctcatactccaatgacggccgccatacagagcgcagagcccacccgcctctctgaccccgaatcgaaacatatcaagatagagaaagagatggaagtcaccgagaaggactcatctagcgccaatggcgcggcctcggtcggtagcggatccatgtatgaccatactcaccgcaagctcaaaccccgccatgtacaattgatcggaattggaggaacaattggcacggcactatacgttcagatcgggtctggactgcgaaccagtggccctggtagtttgttcattggattcagtctttggttagtctttcccttgttatactgtcttgttgactctattgggttctcgacctgggttgtcccggctttgctactttcgacaatatcaacatggacggtaagtaggtggaaatgcgaggaacgaaaaggaaatccgtcaatggatcgaaagagaaagagagaaagagaagcaaaaaagcgaagaataaggaacaatacaacgaaacgaagcatcaagaaacaggattcgaatccctgataacacaatttcaaattccaaggatgtaggacgccgttagcccagacacttccatgcaaaacagatgtatacatgtcgaaagcgccattagccctacctctgccaatgcatctgccgaaagccagtcggacacccaagaacccaacagtcctgcctccgtcctgcgtatatcttcttatactgttatctaggagttgtgtgattttgatcatcactgtctgtacgaacaccctttgcatctttcccaccagcagcattcttcccaccgtatcccatatggcccaatgccatatgacccaatgcgccaacggttcagcctcttgccccgatcgaattgctgcaacattcttgttctctcttctagatgtagtatgacatccaaactcacatcttcttttctaggcttggctgaaatggtcacgtacttgcctatctcttcgccgttcatccgattcgccggccgctacgttgatgaagctttaggtgttgccgctggatacaacttctttatcttcgaggccgctctggtccctttcgagattgtcgccgtcagcatgattatcaaatactggaccgatgcgattcccgtcgccgccatgaatgtggttgtcattgtgctttatgggttggtcatctttctgtgatccgcgcacgcgatgccagctaatagatgggaaacagggtattaaatctctttgctgtgaaatggtacggtgaagcagagttctggctctcactaggcaaggtcttgttgagcacaggcctgatcttatacacattcatcgtcatgttgggcggcaacccgctcggcgatcgattcggcttccgctactggaacgaaccaggtgccttcaacgggtactacaagacaggcgatactggcaagttcctcggtgtcctcgcagctgtcatcacagccagtttcaccatcgccggtccggactatgtctccatggccgccggtgagaccgttaatccccgcaaggtgctgcccaaggccttcaacggtgtcttctaccgtctcacggcattcttcgttctgggtgtcctctccgttggcattctggtgccgtacaacgataagaccatggccgatgctttcgacaacggcaagcccggtgctgccgcctcaccctatgtcatctccatggatcgcctgaagatccctatccttccagacatcgtcaatgccgtcattctcactgcttcgttcagtgcgggcaacagctacatgtactgtgccagtcgcagtctgtacgggctagcgattgagggcaaagccccacgcttccttaccaagtgcaccaacaacggcgttcccatctactgtgtcggtatagtgctcgtcatcggtctcttgagtttcctgcaggtatccaacagcgcagcagtcgtgctggactggtttgtcaatctggtatgatcccctacccagtcccattttcattcccatacacctaattaatcctaactccaggtcactgcctcccaactcatcaatttctccgtcgtcactttcacgttcatccgcttcaagaaagctctcgacgcccaagggatcccccgggaaaccttgccatatcgcagctggtttcagccgtatatcgcctatttcgcttgcgcttgcacaacggtcatggctttcgtcggtggctataccgtcttcctgcccggcaactggtccatcgcgacattcttcttctcttacaccatgatcggcgtcttcccggttatctacttcgggtggaaattctttcacaagaccaagttgctcaaacctgaggaggtggatctggtcactggtgtcgctgagatcgaggattataccagagacttcgtggtcataccgccgaagtaagtacactctttcttttagttatgatttggttctgacaatgcctgtaggaatatcgtatacaagtggttccaaattatctttgaatagaactttcatgggtctcgtcgctgctttggaagattgcgatttagaacatacccaggtgacgtccgctgcgaaccattggccgtctctacttcgaactatagacagcatgtttatatgatgttagcgtcattatgatacccgatattgttataggaaatgaaagaatagacgtgattattagtcgactcgcaatgcccttataatacatctaagtaatatcaacacacaccaaacagtaagaagatgcacatcctccatagccacacacaaagccaagctaagccaagccaagctttccgtgctatatgtctttccttatacacaatcaagcttcacccgatcctccctccgcctccttagccctcaaagcctccagccgcttctgattccgcttcccaagaacgcgcagagtattgctcttctcaatctccgtcatctgctgccaattcccaatctgcgacaacgtcccgtcgacattaacaaccatcggacccaaatgatctaatttcaccgctgtcccgcctccgctcatgtcgagtttgatactcccgtcgccttgttggttcgcgatggggtttaaggggtcgctagcggggaggtagaggtgcttttcaggttgggattcttgttcttgttcttggatctcttggttttgcgtctgttggttttgcgtctgttggttttgtgttgcagggtttgaggacgcagcggctgcagagttggagttggggttcgaggttgagtcacacattgtgcgggtttggtgcgtgcagtctgatgctttgaagctcgttgtgcactgtgggaagaggatgctgtacagccgggtgtttggtgattgcgtggttggcgcgttgagggatgtccaggtagtagagcccgctgagattgtggcgcgtacgaatgggttgacggatagatggaggagagcagcgcggtagactgtgcgcgatacttgcatggttcgggttttggaggtttgatgggctggtgggagggaaataaggattgcggagttggctccggtttctagattattcgagctcgtcgtggattgttacaccgcattcttcaacttgcgcttgtgttagatatgagtttgcatgattaattattacgcaaatagttctatcttgggtatgcatatatattatcttcaattttgtctgtgacatgagattacagagttgagaagaggtgggtgtcaatgggtgcttattttaccatatcgggagtctcaaaacttgcccagtccacctcaaatactccagatctatattctatggttaccaagcatcggagtcctgcgtggacttaccgcatgatacgggtgtaaatatgaaactatcgaaaccaccagttgacctgcaagtatatcagcaacatacacaaagtctactagaagaaacatactcaccgaagccgtaacaccttcaccaacacccttaatactatgccaccaccccttgggaatgaacaacccatcaccagccccaagagacgcttcaaagccaaccccagcatccgaaccagcggacaccggagtcccccaaaccatctcatctaacaacgctctttccctcccctgcatcatctcgtcgccgcggaaagccgctgcctcccgactcccactcttccccagctgcctcctcacagccccgaacacagcctgtccatccgctggcgcaagcagccgcacaaccttctccccagccagctggacaaacaagttcgggttcgggtcgcggtgaagcggcgtgtaagtaggcgggtgtccaatccacacattcgtatcgtatacatcgccctttcccgcacacgccacaagctccggcgtgggaaaatcttctctgaggataggagggaggtcaaggagctggcattgtgctaggtaaagccgcgttgattggggagttgtctcggccgtgcgcatccagtcgaggaacagcgtgagcggcgcgtggaattgccgaaagctatggatttctgccgtttcaccgttggatttggatatagcgtcagccggtgtggattccgtgagctcgagtgggacgaacgcgtcggcgccgtgttggcggagatattccacattcaggcttgcgccggggttcgaggtgtccggtgttgactccagactctcgcgtttgaaccactgtttcagggcggggaggtcttggaaggtagagcgcgggaggattgctggttgttcggggaggaagcatcgctgctggaaggtctccagggtggcatcttcgaggatgttgacaggtctgtattgagggtttgaagaagcggagaagtttcggacgcttgaccggggtttattatgaagggatgagcaactgagtcgcatccagactcggattgaccatgcctggagcttcatccagatcgacgtaggaagggcgagacaatgaagatcggacaacgacctcgggagatgaacgggtggatctccgagataacggtcttcttatcggtctaccacgtgactccatatgctgtttctggaccgccgacacaagtcacccaacacaagctgcagggaagcttgacttgcaggtgaaaaactgaaaactccatgtgtcaataagtataggctatatttagtcgtcaatacctaagataacttccgacgaatgcttacctcaagcgtgcatctatcggagggatctatccgtggactagaactatatatttcttcaccagcgacggtgactatactgttgtcgcattctccgctactaacaacacccctttcacccaaaaatggatcatttatagacagctctcggggcataatcattgtatcacagaccatgatgtagaggaaggacttggtcctccttcgctgcgggcaaattcgcttgtcacacaacttctccccctccctcaagatattcagagaaacgatagcctcttcccaggggattacgtggattatctgtgtgggctacaatgcccgggaagcgttctggccgctgcatcaaaacctacgggataaaatccgtgaagtacttctacagcttcgtgttctacacgcctaaattcatatagaacttggctatcacaggtctatggtcaccctttcgcataggaaagatcgtttacgatcttgattcgcaggctatgtatgtctatggcctggactaccgatttagggacagaagctgaccccatttcactcggcatatatgtggtttctggcagcgaatcaaacatggacggcactgtttacaacttgtttccgcagtacaaagctgggccgagaattgggctagctggagctggtaaatcaatatactatgatggtgcagttaatctattatcttgaccccgctccagactcctttctcagaccgaatttgcacaataggtccttggctggtatcgagtacgaaccctactacaaccaacacaagctgtaaaaaggcatcaagcgatttttcctgagtataatttgcccttcaacccattctaaaaaggatcaatcatgagccatacagggagtattgccgtcaatcacaaagaaggtgcatgaagccgacgaagaccgaggttaaaatggatccatgcagttttgtacatacccttgcacgtctgaaaaaaggccggccatgtgactgtacttccctagccaagaaagaccataacatttaaagctcactcttgccctcccaggtttacggtcgttgaattgcctacaattactattaacttgcaacatgccttcttccatcacccaaattcataagcgccatgcatacggcaaggatgctcacacttattatccggtcctcatagtaggtgctggagagtcgggagtggctatgggttgccggctcaaagaggtcctgggaacagaccagttccgaattttcgagcgtcagtcaggtattggaggtacctggtggatcaataggtatccgggaattgcttgcgacgtgtaggtgatagtgttctaatgtctaaaagctcaataactaacctagaaggtaaagaccagcgacattctactctttctcctttgctctgaaaaaggactggtccacacttcatcctcccggtccagaaatagcacagtatttggcagatgtctgcgagagatatcaaattgtggacaagattcagttgaataccgatgtcaaggaacttcgatggatcggggatgacgaggaatgggaggttacgctctcgcacctcgtccctggaaccggcgatttgactcaacacgaacgagatcgaatcgcggcccaggatggccatcagaagatctacgttaatacagaaattgtgcgagccaaggtggtcgtgagtggtgttggcgggctggtagaaccgaacacatggccgaaggacatcccaggtattgaacacttcgaaggtgacatcatgcatacggcccgctggaacaaccagatcgatttgaaagacaagaatgtcatcatgattggttccggctgcagcgccgcgcaggtagtgcccgagctggccaagccagaggccaatgttcgatccattacccaactcatgcgaacgcctccgtgggtcgagcctgatacaatttctcctgaatatctccctgtgtacgaaaaatggtcgcctagactggtgactaacttgcctggactggcgttattcatgcgatgtgttgttttcctcattatggaaaaaaacttccaggatatgttcacggacactgcatggagccgaagagcgcggccgcagttagagaagaagtttttggaccacatgcgtcaaattgcgccggagaaatactacgagattctgacaccaaactacagcctcggctgtaagagacgggtcatcggcggcacttggtatcgcagtctcaatgctccaaacgtggagctaactactcagcctttgacaagggttaatgcaaagagtgtgactcttggtacaggccgccactatccaccgcacaagtctgaagatgcagttgaggttagagagattcccgccgatgtgatcatcatggccaacgggtttgaaaccaaccaatggctgcacccactgaaggtgattggcagggagggcaaagatctggaagaggtttgggcggagcgtggaggtgcccaggcataccagggtatcgcaatggattctttcccaaacttctttattattttcggcccgaataccgcaacgggccataccagtgttatctttgcaacggagaatgcggtaaactactcgttgaactttatcaagccgatcttagatggtcaggtcagctcgtatgaagtcaaggaggatgccgagcgtgaatggactcagcaggtgcaggatgcgcttcagaagagtgtgttccgtcgtggggcttgctctagctggtacatcactgccgatggttggaactcaaccacatatccgtacgttccttgcttaatgcttcctagttgttactgacatagtatccagattcactcaggttcactattggttgcgttgcaaattccccgtgtggcggcattggaccgcgaaactcacgagaaagggacggattttgcgaggtgttcgaatgactctccatggtgccctcatctttgggcttattacaaccattggcttcttgagaaagaaccctcagcagaaggctcagttggagcagtcattgctggccggaaaggagtggctggcctcggcggtttcgcaattgaagcgatgatatcttttccttgtgtctttcgaaattggagcactatcttcagagccaaaaatatacgcaataacaatattatgatgtgcatcagtatacaaatctcttatattctccaaacgctaggaccaatgactgaccggataatcagatgagtaagctgaatctggggaaaccccgcgggagaggaatttctccgcactttaactcgatagctctcaccggctactcattgagtcgcttcatattctgcaggccatggcttcagagtcaccccagatagaaatgtcaccgccacagtcggatccccgcgatcattccgtcggtgcgtctgattccaacaagagaaaggcggaacaaggaaacggaacgcaggcgcgcacgaagcggaatcgctacatctccattgcatggtatgatatggcctgatataacctgatccggcacattttcctttccgtacctcggtcgctttaccttgcaccattggatagcctgttctgcattcaaagccatacgattctgcctacaccttcggtacttttgtcggcggatccgagctaatcgtggagttttcagtaatgaatgtaagcggcgcaaaatcaagtgcaatggccagatgccttgtcaacggtgtggccacctgaatttagaatgtaagtgggctcatagctcgtccgagctatccgatcaacggtctcatacgctgactcactcgccaggtcgctatgcgcctaattgttgtaataacaatttcaaagattcggagtaagtcgaggagtaaaacccgtccagcatttgatactaataaccgggctagtgaattccggtcaatcacagatcagatcactactctacaagaccaagtcaatagcttgttcagcaaccttaatgaacttcgtacccaaagaccagcctttgaatcaccagattttgagcatctctctcgaaatggatctcaatcagtctatactccaatacaagctgggctagaaaagtcccgagcccggcccccacgctttcatggtccaacaagctcggccttcaactttgacgtggccaaatccagtttgcagaatatgggtatcaccccagcggaagatgggatcccagatggcttgaccaccgcacatgtatctccaacagggtcaccacctcccaatctgggacaacttcttccaaccacacaccctaccaaggatccaatatggacaatcccgcgtgaagatgcaatgcgtctttgtaaggtttacgaggaagagattgggatcatgtatcctgtggtggatatcgccaaggttaccagccaggctaatctgctctacacattcatagaggctgccacccggacaggctttgcacaaagagggtttccgggttctgacggtcttcacgacgaaagctcgattattcttaaattgattctcgcaaccacgctggtcgtggaggggggcggtcagagtgaacttgggcaccgactctacttggatgttaagccatttatagaatcgaagttgtgggagcctcataccatcaaaactatccagctctttgctattgtggtaagccaaagttttttcaaagccgcagtcaataaccctaactttttttcccactctaggctacataccattaccatacggacgatgatgccatggcttatcggcttattgggttggcagcacggatgtgtttagagatgggattgcatcgtcggaatgctttggtgaagtcattcccagatgaggtgcagtgggacgagatcactcggctgttctggtcagtctacagcttggacagacgatggagtttaggaacggggttgcctttcgtgattcaggacgaggatattgatccgaacttaccagaacctgtaaggctgcaatctcttgccacgtatttacctttattaaccaagatgtgaaaattacaggatgcatcgttgccttacttgcgctgcatggtcctatacaaccggatcagctccaagatctggtactctggtttaggctccgaaggcaccaccgacatccgtcgtgatgagatcggctatctggattaccaaatcctgcagtggtacaagcaggttccagaagagctcaagttctatcctgtcgactcccccaaaaacggcgaaaacgtaagcagaggtatgaagagactcagggttctcttatacctgcggatgaaccagctgcgcatcctgatatatcgccctgtgctccattcttctgccagcattgccgaagatcgaggccacgcacagactgttgtggaagtagccaaagactccatccgtgtcttaactcggctgaaccagttgtccgatatctaccggacacagcaaataacattcaactatttcttggttgctgccttggcggttctgttcctagcagtgtcccacgccccggtcgacttcaaccgacaggtccgcgatgaattctatatggctctagacctggtcaacgggtttagtaccaagtcctacgtctccaagcggttatggaagacaattaaaggtctacgaaagatcggcgagaaacttggtgttctcgcccgtccttttggaacggactcaaatgatcctcattcaagcgctgcggtcgccatggccgggctcgcgggacatccaatccaggacctgtctatgtacgggcctctgaatggtgggaatgaacttggaagtagtcctctcaatggactccagatgagtcaagagttgacaaacctatttgaggctgttggcgcatttggtaatttcatatctaacacttcaagtgacggtattaatggattcgttgggccggatggggaaattcagaacactggcgagggtttatctggggttttgggtgatgagggagagtttgcccgagtcattcgagacttattttgatattccagtatatacccttttatatttacctaggtagtaacatagtatcacaggccagttggaaggttagctaattgagtcgatatgaatatcttgcgtacatgtctgcagacattgatggcctgcttctcttcccacgtcagctgacacgtgactcctgccactcaggcaaatcgaaacctgccagcattgacttcgctttagccatcgtgggagacaacagatacacaatagctgtcccaaaacgtgaacgcccaagcctttctctccaactacccaccgcccccacgaaccgaacggacctaacccgattcgatcgacacacccaacctccaggctcgatcaccaatattaacctccgagcgtctttgagctctggtaagtgatccgacggctttcgatatgaaggccacaagaaactgataagattctagtggggccttagatccaacctcttcccgtcgatcgcacaatctcccctctcccgcacattgccatgaacatctagcttttggcccctccatcaacttcaagatctcctccaattacacttgaagtctttcattctgacccccaaaccctgtaccccttttcgccacgagccagcctctccgtgtgacgaaatcgcttcgtcttcgccaacatcgccgaagacctcaccccccagctcggcaacgtgtcgagagagacaggttcggcgttggccgacggcctcgacaggctggatttgagtcaactgtctgaatcgaccctttcgtcatctgtgtccgcctcattcgacatgtcgtcctcggaaggcgcgccggagtcctggatttcctcgttttgttcgttgatgggccatgagtttttcgcagaggtgtcggaggacttcatcgaggatgatttcaatctgactggtctccagtcgcaggtgccgatgtacaaggaggcactagagatgattctcgatgtggagccggaggatgacgaggaagaggaggaggaagaggaggaggaagatgaagacgatgcgctcggcggcgaacctgcatacagaagagccggcgatcggcgacacgcccgagtcgcaagcgatttgagcgtgatcgagagctctgctgagctcctgtatgggttgattcaccaacggtatatcacctcgcggcctggcattcaacaaatgctcgaaaaatacgagatgcagcattttggcacctgtccgcgagtcaactgcaacggatgcaaagttctccccgtaggccgatccgacacccctggccacgaaacggtcaagctcttctgtcccggttgcatggatatttatacaccccccaacagccgtttccactccgtcgacggcgcattcttcggtacaacgttcggatgtctctttttcatgacattcccagatctggatatcgggccccgtctggatgcagcactgtcatccatctcgccacggaatgcagcaacgcagtctcgcactggctctctgacacgcactccggcaggtcgccaggcacggtcgcccacaccagagaatcagccgctagaaatcaacggcgtccggacacccaacctctgcccgggactcggcaagggcaagatctatgaccccaagatctacggcttcaaggtctctgaggtctcgcgtgtcggcccgcgcatgaaatggctgcgcatgaagcccaaaaatgttgtcgagctcgacgaagcgtggaatcacgagcatgggatgtctccgcaggaggcacgcgacgataaggagggcgacaccgagatgaaccctgaacaatcgcaagatgctgccattgcgaaccgcaagaaggccccgatgcgacgccggcgaccgaaccttggcgccctagtccccacagatcctatggacgtgcacggtcgatgaggggataaaaagcttgcattcgtggttgtttcaagattaagtcaccgtgtcaggggaatatctgtgccatgcccttgacgggacgattggttcagagttgatgacgatgatgacagatgtttgagcttggtctactcgctgctttgaatgggattctcttttcttctaatctattgggcttttattctgtctgcgcgcatcttcctggccactttccgcgatcctgtttcgagtacaaggatcaacttgtccccattcattgttttattcttttgttcgtccgtagactcagcacattacttttttgaatggaacatgatagtagtaaacattgcttgccaactatctttttacctacatgcttcacacttttatgactcgatgggtacagagtcaccagggcccacctccacgtcagaagacaaatcatcataagagcaacagagcctcaagtaccacaataccctaaggatctgcaaggaaaagctgagcctccaccaactttgaggctccaactgcatgtgaacgtcgcccaacaggctcgtgtacaccggcgtccccgacgtaacccaacgcatggggaatttcaaactcaaacattccaaatcatgcagcaagtccctaagtctactcagtcatacgctagcgtttgacgttagcacatcggcgacgccgacgtcaaggatgcacgatgcccgtgccacctatgacaacagtctcgtattgattaggccgtgccttagttaacttacttcacactctgaatctgatttgtaaggatacaaagtacataatttataatccactcaaccggtaactacctagacccctgcacaaagaaaacacaccaagtctatatagtgcgccggactggcggactggcggaacggcggatgagcggtccacctggaaatcccattggggatttagcgtatatgtatatatgcatggccacacgcaaccctagtcaattattggggttgggcgcgtagacaacttcttcgacttggtttgtcctattggagtcgtgagattgtggtgtaacgctgggactgggactgtcacatggggtatacctcataaccatggctaagattctttgttggtgacgcgttgcgattctcaggtattggacgatgctgttgacggtgctgttatggtgggtcttggctggtgagtgcattgtttgtgctggcttattggttttggtatgttggttctggttgccttgaatgagggggttttgtattgccacgctcctctcttattctatttcttttttaataatagctagggatattggaccacatcaatatctcagtggtctaaagttggtaacgttgctatattggttttccaacaatgtagtatatctttcttcggctaatacttttgacgatttggtcctttcaaatttacttttgtaagaacatgagttaatatacagatctatgaatgaatggtgagatctttaattaaataaccttgcataatcttatatcttggcactggacacagtcagcctggaaatgagttgatcatcttaaaattaggtcttacccatagtcctggtgtggatcaaggcccattgaagcgagtacaatggtcccccctactcaattgggtatcatgacagcactatcccaacaacataaagcctcgtattactcggacttcggagaaggaaatagagaggaaggggacatctacggctctctcaaccaagccctattgacagaaaaggggttttagctcctaaattacatttcaatgttcgaagtaatatcattgcccgttttaggaaagactgtgtgcggtggctgtagcctcaacccactctataaacccactcgggggacattggagccacaatttagaatcaagtaagaaactggagaaagtaagagccaaaccttagttagaagccttcgattactctattgggagcttatcaaggcttgtttttgcccacctaccacgtcagcaacattaacgagcgcacgttctctctttgcccttcgggaagaacccgagactaaatgctgactgctccaataaatagtctatctcagagacccataattggaggctcatatggcacatggtcgagaatctagtactccgtactgcattcctaattagtgccacgcacagcaacacccgcgtggaaattacaaatcacaacatactctagaccagcagctcaaaacccaaagtcgatccaagaagatctcgaccagctcgaccagctcgaccgagtattgcccatgcatgtcgacccaaaaatagtcgtactccgtaccaagacgccaagcactccatgtatatatgcgtcgcaaatcgccttcctcatctgtcaaggctcaaataacgaagaactcccgacatagcaaccgaaagacctacagaccacggttcccaatactgcggtctcccgcgctgactgcggccagccccgctgcagaatgtggagtttgacggcgcatatcccttaaggcgccctacgggtctgggcagcgataggccgatcttagctggttctgattcttgacattaggatcatcatcatgtcaacggcatttgtccacgggtgttcagcttgctagctcacatatgtagtgggtaattcgaggaactttattccgctgtactttttttttttccgttgcatattcccgttgatttgcgctgttttgtctagcctcggactggggttgccttgtaatggtatgtttgatgcgagggatagatatcctccgccctgtacggagtatacggagtatacggagtaagtcttactagcacggaagctcgaaccacagctgggggatcctatctctttctctctttattcggattcccagcctcggcaataccggccgagttgacatttttggctttcgccgtagataaggttggggacaaatgcgggtgaatcactgcaacatgcgacgtgcgacgtgcagagaggaggatcggtcaaaaatccgctattatacaaacataaaacaccttcctctttggccaatgctgaagccctctggtccgcatctccatttttttttggatcgacaccggtcagggatgggggataggcgggaacgctgcagcccagagccgccaaccctgataagaggaagcccccaggctaagccaaggctaagctgggataggaaaatgaacgctattggttaggccgcatactttcatgcatttagccctttagcacctcgcctctaaactcccgccatgtgggttgagcgggaaggaaaaccacctaaattatagcgttcagcccccaactctccagtaaacgagtacggaagcacagagtaccctaggagactaattcaggccgacagatggaggggccgtgtttttttcgcatcgtcgtatgatcgcagcttttctttgcggcagtgattgcatacagcaacccccgtgccattggtcttggatagcaatcgttggagtcagaaggcttcctcggaaacagacctttgggacccggatgcggatgtacactgtacccggggcgaaacatcaccaatccaaagtggatgtgacggttggaaattaaaacgacagcgtatattgtactagtagtaggcgtgttttacttggctccagtttttcggttggctttcttagggtgtttcttagcttcgaggatcgaagggggtccttggttaacgtgctgtcctaaccaaagtactccgtccgtacaaatgcttgaaaggaggggggggggaagagttgaggcggagcaaagtctcggaccacgtccgtggaccgtaggcatatagggaaacaggggtggatttatggggcggaggataatgcagattgcatcatccgacggatttattggaattccagtccgtttgaaatgtcggagtggctgttttagtccaactggcccaatatcccgggataaagaagtgctactccgtatgtggggtattgtctctttctgcagcgatcgggcttttcccagcagcctggtccttagttgacggttggactttgctgactccgtagttcgagatgtttcttgagtcatgtacttgtgaacttgtccgctttaagatatcggtcggtggtttgtcatctataactgtccacgggtcactagttagggttaccaaactggggacgtcattgacgaatagacggtccctcaatcaccctcgagaccttcagaacagaaaagggatagtctcggccgtacagaatgtctctcgctaggctgaaattgaaaatcccgcacggaggtttgggggccgtggagttaatgcaagttatgctggctttggaccaatcgctgggagaacttccaaggttatatgattctattgtgcagtgatcaaattcgtctgtactctgtagatctggattaatcagaaagcaggaaaacaaagcatcgaaagaaaaagaaagaaaagaatccattcaacgtggctccctggctcacccctgttcccttgacaccacgctaccaatagaaagaaaagaaatcaacgccagttatcatgcagctatctcatcacacatacaacgtaataggggtaaaaagggctaaaacaaaacagaaaacaaaaataaaaataaaataaaagagtggggaggcaaaaacgtgtcgggtggattcgagtccggtgttcggggtcaatagggcctggatggggcggagatacccgcacttcgggctttgctgcccccgatcgccccgatcgccttacggccgtagatcgtactcatacaggccatgcatggagcgcggcgagcaggggcctgattccggtgtgagcgggaatgtgaaaatagatgtctccggtgacgtcgacggtgctcgttggtcgtagtatgcaagcgctggcatctggaaacgcaagcaagatattagctgacgggtcggcaattcggagtagattcagcgaagaaattgtaccgggagcgccgaagactggtgttgagaatgggcctgcgcttgggcttgctgttggcacaggtcgatcccggccatggttgcgtagctcatgctgaacggactgatcaggtcgtcgtcgtaggccagtttgcgggcttgcatcgagggcagcatcggcaccagcgaggggagctgctcgccatattcggcctggtaggcgatttcgctgtaggtgctcggcgccgcgtggtagatcggaggctgggcgtaggacggccggtaggtgtcatacgatgccatagatgggtaggagaagaccggtgggggtgaggccgaaagctggcgagtgcactgctgggcgaacatggtttggcggtcctcgggggaatagtagtcgtacgaggcagctcggtctgattgcgagtggggcttgacatctgtgactttggagcgcggctttgtttgagtctttggcgacggaggagagaccggctctgcgtgggattgctcgggcgaagcagaagttgcagctcgtctctcgagatcctccaagcggcgcttcagtttcttgcctgttgggttgcgccgggtcaggaatgtacactcggaacggtctttctctttttcacttacgatagttgcgttgcgcaatacggttttggatgcgccgacgctctgcgagatccgagatcttggtccagtcctcgtttgggttggcgttaggactgaatgcgctgctgttgaggtgactaccacgagagcctgaacggccatcgtacgatggagagcgattcatagtcaagaggcgaaggccaagagcgatcaaggtagagtacagaatagagtagacagagagggaatagtatagtagaagtagaagcagaagtggaagtgaaagatgaaagtggagggatgtgataacggggctatgaggctaaagatccgtggccaagtggatgtcagtatatttatatataagacgtcgaggactcaaggccattgatcagctggaattggtttttcgggccttgcagctaagccccgtcgcgataaccaggtcagtccgtgctcgaatgccattagactcgacttgccatgtgcacaaaagtcccgggcttatttcgtttttttattttattttttattttgcccagggatccacgttcagcctctggtaatactgatggatactgtcatgaaacgtctaactagatatgtacaatggtcagtctactggaacggatccgcgaaacccttaatatctaatataccaatcactagccaagctgggaccactaaactcctaactcctactactaacaccgacaggccggtctctgatcggtggatctcagatctaatacgtagcaccaaagtggtacggcgtatgatcccaatccaagacggtaggatggattattggagttgggccgggactcgctaggcgttcgctcgagggcgatccttatttgacctgactggcccgagacacgatatgcccagggatgaaacgggatgcgtggactttggggttacaccttttgcctttactttcttctcctatattctcacgtgggttgcttcaatgtgcacggtcgtgaccacgtttttgtttggtcttcatcttggcaacggactaggggataaagatctgacttggttgatcaggatcaggattctggcactattggaataggagaagggattttcgggactatagacgaaaacaactcctgggaagtctaggcgccctggagtcgggaagtcgggcctgtatcgcctacggatgctgaacaattgggtcgtatacttggattcaccctgacgcatgcactggacgagccaccgtccttcgtgactctagaattaatgacactttgcttttcttggctctttttcctgctttattcgtttttttcttttcgatttttcttttctttttttctgaattattcacgcatttccactggttgcctgattggcatcgacaatcccaatcaaggcatacgctgcgcagaaataagggctggccgtattcctttttcgtacattgtagttgggagttaatgtttgcttactgtctagtctaatctacagccccggagatacgcctagacccagattcttgacaaatacgaaatacatcgttcaaagcccggaaatcgggggccggaagggaaatccgaaaaaagaggctcttctcaggtaagacagctatgctatgaataggtagccttgcagggtctctccgccaactcgggtcggagttaatagcaggaatgcagtgcgtattggtccaactccgctagtgcgtgcccgaaagtcgtcttatcctccctgtatagggctgagttggacaccttcttattcctgattgagtaatgtcggagacgcatcccatgaccccagtgacacgctcaacgagcacggcagctcaggtacccggtacatagttctcttgaccgctaatgctgttcacgcctccagttggaattccaagcattgcacagccatcctggcggaaacgcttcctcctgcagggattgtagccactcacataccatgttcgtccccggatgctgggatcggttgcatttcgagccttctagtaacaatctagaagaatgttcctggcggtgggctatcatgcagcccccgaccttgctgtgtccgagatgcaccccccatgacacatgcgtcgctgcagaatgcctcgtcttttcccccgttgtgctttacttgtttttgcaatatttcctttttttgaggagcttggtgtcactcgaggattatcaatgacggcaagctccgagcctcttgcgtcgtgctggcacgttgtcgttctcgcttggggttgttacactaaacgtgaaatggaccgatgtgcgaaagtccattcaagcgagttcactgggtgtgccaacttcattccagttcgcttcaaatagatttgcccaggtcggagacgtcggacaaggcgtccagtgctgaagctggcgaacaacacaatctccgatgcgagttcatggcaactgcaaaacgaacatggtcaacatccagtttgttgctctcttccaaggttatctcaagtcacaccaacaactcggcacttaacttcttcaagtttgcgttttactatatttgtcatgtataggtcaacaataagtccgggagagaataattatagactctcgtcgggggtatcccaagataagaagctgaccacctgttcccctccaagccacccaattccagttattccccgatgcaatagaatccataagagccttaatcgcaaccccccgaatatgccgaacactaaatttagcctatgagatccaacaacccccattgttctccatgcggaacatcctgaaacgtctgtcgtaccccgctgtggttctaacttttgaatctgtagccgaaaggcgtacagcctgggcctgaaaccctctcaagtgcagagaaagccgagccggttgttctttttttgccgttcctctcgcttcatttgtcgcctctgggtttagcctcattccacgtgggccacgttgctgcatgtcgcctattttaccttgttttcggtcaacgtgcagctggatatctgccgttggtctaggctgtattcctgcgatatgatccattcatccgggctatcaattggatggctccataacccttgtgattagattggcatccacggccctgtctcagggtttgtctgaagtcaatgtggaattataagacgaaacaggcggggttacgggttcgggtggctgacagtcgtcagcactatgtttgtgcaaggtcaagctaaacgatctacatatctgaaactccatgtgcttgggatagtattatgctcgtaggtatctcagcattttctctgcaagcgagttaattcgactcgggtttgagttattggctttgaaacgatctcaggcaggtatttctctacataaccgtgtagaaggcgacagcaaaaagtaccatttctacttcaactgcatctgcatctgtcaacaaagtctgcgttggctcttcttcctgacatatttcacgaccaattattttctttctccatcttggtaaatctgtcatggttcgtggcgttatgtgaacaagttccgctatataattttcattgcccgggtgaagatatatattttggcatcgccagcttgtaaactcattgaacattatgcaatcctagcatactctataatgcctatactgtgattatatgtatcaaattctttaccttccccttcctagaggtcctcatgataacatataacagcactccatcaatgcctcgaatggagttgttcttactgttgtgtaaatatgtgttttcccgtatcttctcgtttcaagacgtcgtttgcaccttcctgcattatcccatgagcatctacccgtggacataattggaaaggtaaagaatcacctattgacgcctgaatccgtatagtctggatcataatctctgcaccttataaacgcctcttcttctgttccctctcctcctcctcttttccatcttaatggttcttatttatacacttctatatcctgccctttctccacctatcacattcctggcaaggcatttgcaatgagatcttatcaccttgaatcctcccgcatgctctttggccgtatgttgatcaaaatatcgataagtgcagcttggttcttcttccaaggggtatggatcaaggacccgtatcccttattagaggagaagggatgcacttagcgatattctgataaacataatgccaaaaaacatacagaacagattcatggaaataagtctttgggagtataggaggccactataaaccaccagatggttctggttcatcgttgccgattgttactccaatctttattctcaatcaacgtccaaggagtatctcaatggagttgaactgacttggtaagaccttcgtagtttgtattttctccccccagaaacggtaatatgccaatcatacagcacgtgttactcgaagtgtacactatacatctacgaagttgtaacttaacgaaaaaccgaggataccaaagttcggaaaagctctctttataaagaaccaagctccagatgaatatgtaaaagacgcccgccgctgctcggtagcctcggtacctcaaatatccaaacaacatgcaaaatgcaaaatgcaaaattaaccaagtatcccttgagcaacgacttttgaaagcctctgcagccatactacaaagcttaggcacagaagccctttcatctcacatgtcagtcttagagcgcgacactgacagattgttagtatatcatccaagttcaacaaggtcagtgccaacttacctccattcgtgcttctcgtcaccgtattggataccctccatccagttcttcatctggagagcaatctcacccgcctcctcatccgccttcaaaccacagtcaaccgtcttacctctgtagctgatgttacgaacagggctgacgatggcagcagtaccggaaccgaatacctcgatcatgcggccctcctcggctgcctcggcaacctcggacatgcgaatcttgcgctcgcaaatcttccagcccttggggccgagtctctcacgggcgagagtcagaacggagtcacgagtgacaccctccaagatcgtaccgtcaagaggagcagtgataagctccttctctccggtctccttgttcttcaaagcaatgaaaaggttcatggtgccgacctcggtaacatattcctcctcgccgaagagccacaggttctgctggaaaccacgggatgcggcctcgagttgaggcagaatgcagggagcgtagttggctccaagcttcttgtcaccaacaccgccgggccaggcgcggacggcgtaatcagtggcctccagggagatggccttgaacccagttgggtagtagggacccacggggctggcaatcacgtacagaagagcggatcctggtgggccaactcccagggtcttctgggtaccaatcatggtagggcgcaggtacaaggagtagccgcgagcgctgtggaggttagcaaggatgtccatctaatctacacaagatacactcactcaggaatgaaccgactatcgagcttcaccaattctccaataatcttcgtcagggcgtcaccatcaatagtaggaagggcaatgcgcgccgaagacttgttcaggcgttccatgttcttattggggcggaacagacggatgccaccggtgctgtccttgtacgccttcataccctcgaagcattcaaatgcgtagtggaacacacaggtcgcagggtccaagctgaggttctggtaggggataatgcgaggtgcgtgccatccgtctgtagctgtccactccacggagagcatgtgatctacattacatccggtcagggtctggaaggcaatagagcgcagagtttctcttacctgtgaagtactttccgaaaacaagatccttggattcctttagctccttaggggtggtggtcttggtgatagtcaatttggaagggtcaagacccgggagctgggaggcggctgccatagaggcgctgaaagttctctgccatgtccggctggcggtaatgttctgtgatgagaggacacggggcattgagagcccggtcagagcctgtcggcgagcgaattggtgaagcgacttcatgactgtggtgatgttaggaacgatccaagggccagccaagggtatagagagtgaagagtgtggcaattgagtcactgggagaagtataaacgtactgaaatcgaggaggtcaatggaggtttatatcacaaccagaaagatgactccgcgccagaactgcagcctctctgcggagctcgacaacaactccgatgactcggaggccccaatcaggaagttctgccaccgccctacagataaagattgtcgctgccaatcagcgactgcaaattagagttgcccgccgacttcggctagttcggcttcctttggcttgctgcggcttgcatcggttacgaccgagctcggtagggcttcaggcctgaggcacatgccaatagtttatttatgcctaaggcaacataccagctattgacacgatcacgtgataatatcgattggaagagtgcctgttatcgaggacctgaggtcgtattgcgccggattattgaccaagtatgcaaccagtggacaatttctctcagcctttgagctaatgttcttaacctcccattagccatcgagtttcaacaccggtccaccttccatagaccctctttctaaatcccaccgttgttgaaactaaatatgtcttatgctggctacaccgtgacgacactgtgaaacgaacaactcccttcattccgactatcgtgccgaccaattctcgtctgcggccttaccaccatgttttcgtctgcgctcaaatcgttcagttccaacatttccgcccattaccagatctcacctaaccctaccgtctactccggcccctggaaaatccacgatgcaaagaagaagtccacaggaacggcggcatcggtgtttatatttgatcgcaagtcactggagacacgctctaatgggttcggaaggagttctgggtcctccgccaagaagctacaggacgatgtgatcgaacgactcaagcgcgaagcaagcaatctcgcgcgcctacggcacccatctattcttcaggtactcgagcctgtggaggagacacgtaatgggggtctcatgtttgccacagaacatctcaccgcttcactttccgggctgctgctggaaaaagatgaccaagagaataccacacgcgccggttcgcggaccagccgggacctggtgtaggagnnnnnnnnnnnnnnnnnnnnnnnnnnnnnnnnnnnnnnnnnnnnnnnnnnnnnnnnnnnnnnnnnnnnnnnnnnnnnnnnnnnnnnnnnnnnnnnnnnnnnnnnnnnnnnnnnnnnnnnnnnnnnnnnnnnnnnnnnnnnnnnnnnnnnnnnnnnnnnnnnnnnnnnnnnnnnnnnnnnnnnnnnnnnnnnnnnnnnnnnnnnnnnnnnnnnnnnnnnnnnnnnnnnnnagcccccgccggccggctgggggacccggccggtacgtggttgaggaggctgacgggactcggagaagaagagaggtggagatggatgagttggaaattcaaaagggactcttgcaagttgctaaaggtcttgaattccttcacgagtctgcgggcttagtgcatggaaatctgaacccggaggccatctatatcaattccaaatcagattggaagatctctggtctgggatttgcggggcctccagactcttctgaaactcgttcgacgctaccgccattggctgtgtccgaggttctctatcaagaaccaaggctgcccgcttcggtacaattgaaccttgattacacgtcgcctgactttgccatggactccaatgtgtctgcggccgccgatctattctctttagggctcatcatcatcgctctgtacaactctccgcatgtctcgcctttacaaacgcacgcaaatttgtccacatataagaaactgctgagctctccgtcttccactccgtcacagagcaataatttcctcagttcgaagccgattcccaagggtctactttctgatgtcctaccgaggctcattacccgaaggcctgcccagcgcatgaatgctcgagaattccagcaagcacagtacttcgacaatgtgttagtttccactatccggtttctggaatctttgccaacaaaaaatcccaatgagaagactcaattcttgcgtggcttacaacgggtactacctgagttcccggtttctgtcctagagagaaagctattgggagccttgatggacgaactcaaggatcgggaattgcttccgctcatattgcaaaacgtgttcggtattcttaagcggattcccaacggacgccgtgtattcccagagaaaatcatgcctcgtctaaaggaagtctttggagctggctcgggcaagggggctgctgaacgagactccaagaaagatgctggtctcatggttgtgcttgataatatgaagctgattgctgataattgttcagggatggagttcaaagatggtgagttttgtaaatggaaacctttgagcttaaatctcacgcttctttctagatattctacccttgattcggctcggactggattctcccactcattctttggtggatgcttccctcaaatgcctccctgtgatgctcccagttcttgatttcagcactgtcaagaatgaggtattccctcccattgctgccacttttagtcgcactagcagcctcgctatcaaggttcgcagtttggaagctttcagtgtactttgcggcgcctctgcagaaggttcagacgggtttgacgatgatttgtctggaatccaggcgactaagtcaaaaccagccaagtcctcgatattggacaagtatactattcaagaaaagctcgtcccgtctctcaaagggattaaaacgaaagagccgtcggtgatgatggcagcgttgaaggtgtttcgtcaagttggaactatcgcagataccgaattcctggctttggaagttctgccggttctctggagtttcagtctcgggccacttttgagccttcaacagttcaatacctttatggctctgataaaaaccctctcagcgaagattgaacaggagcaaagcaaaaagctgcaagagctatcctctggcgctggaccaacgggtttccaaactggtgccgacgaattttcgcagtctgccactggcctgggctcgcccgatgcggacggcggcgctggcagcttcgagcgccttgttcttgggaagaaggcattgcctgcaaatggccagagtatagatatgtggggtagtatggagccagccaagccagcggttccaagcatgctgccttcattctcgtggtcttcaaataatgtaggcatgacaccccaagccaatgccttaagccaacagtccaatcttggattccgttccattactccagatcagaaattgggttctttcccggctcttgctccttctcggcaagcttcaccggttgtccaagccttccctactatgcagccctcatcttctacctggggagccccagccaatgccaatgttcggtcccatacaggcccaacaggtcagtctttggggtccatgtcgactatgataccctcgaatcatatgtccgggtcaacggcgcaaccggcacccaactactcctcgttctcaatcccccctcctcctacaggaaacatggtgtccaacaacgctacgagaccccctccgatgaacacagccaacagatcaacgtctttccaaggcaccgccgcgacaccacaggcaacgcaaaagcaagggttggacaagtatgagagtctgatataaggaacaattcttgttattttctggctgatacaccttttgattgctgttattgctgcttttgcacattcccggcatagtaaatagtcgcagcagcagttgtaattaagaaaagtgacaaaagaacattcaattagcaaatcagcccatgccaagcaatgtagatcgggactccatcggtgatccggccgttggctagggagacacgtacctgattggtgcctcttcatactctatgtcatacttcgtcgttaaacccctccatatgcactcaatgcgtggcattgcgccgcatttgtcctcccggagctccgtgtcacctttgttacccctccatcgaatctcacgccggttgactcccagactggcaaagaccttctcctcgtatactcatctaactcgcgccgccatggacctgagcatcaaacagcactatctggctgactcacctccgaccgtggtcagactggaagtcaagtcacactttgatacactcaaagaccaaaacttgagaaaatatgcgcactttatgagcaggtatcgtgttcctggattccacctcaagagctattgacagctaacctttctcgttatacagggccgcgtttgagggcactcgagtcaccctgcgccaggtctcccccgagtccgaacctatatacgacctcatcctgtcactctaccacgccgccaatggcgactggaacagcctcgcccagaaaacacaagtcagtcccgacgacctccgtttcttcctcgaatatgcgagtcaattcttgggcaactgcggaaactataagggctttggtgactcaaagttcatccctcggctgtccgtctccgcattcgaggctctggcatcggcgaccgcggagacaaaggcagctttccagaaggcgaacaccaccggaggagggatctacgagaccagcgaaggatcgatgatgcacctcggatatcccaagggcggccacatgaccacctactaccccgattcgccaacaatctcaaaggaggaaatcacggcagttggtgacttgatggagaagaagggacttgcgttggagaatactagactccggaagacatcctcgggtgatttcgagcttttgatcgcgtctggtgtttcgtcgcctcctgtgagggaccgggatctcggcgatgtggacacatttgagcttgacggagatctgaagggaaagaaactgcgtcttgtcttcggtgaccatcaggaggagatggcaaagatcgcgcacagcatcaagcaggcagaactttctgctgcaaatgataatcagaagaagatgttggactcatatgctctctcgttcggagctggatccatcgaggctttcaaggagagccagcgcatctgggttaaggaccaaaagcctgttctggagacgaacctgggctttgttgaaacatacagagacccccacggtgtgcgcggagaatgggagggcttcgttgctttggtatgacatgtgctagatcttcattggccggtatcgctaacattcgcaggtcaatctggagcgcacccgcgcctttggtacgctggttgatagtgccgagagcatgattcccaagctgccctggggtaaggactttgagaaagacaagttcctcagccccgacttcacatcattggaagtgttgagtttcgccggctcgggtctcccagctggcatcaacctgcccaactatgatgacattcgccagaaccttggcttcaagaacgtgtctctgggcaatgttctcagcgccaaggctcctaacgaggctattcctttcattgccgagaatgaccaggaggtctaccgctcattccgggacccggcttttgaggttcaagtcggtatccatgaattgctgggtcatggaactggcaagctgttgcaggagacagcgccaggggagtacaactttgatattaagaacccacccatcagccccgtcaccaacaagcccatttcgacctggtacaagcctggacagacatggagctcagtctttggttccattgcttcgtcatacgaggagtgccgtgccgagtgcgtggccatggttcttggctgcgactttggcatcctgaagatcttcggattcggcgatggcaaggaagacttggctggtgaggccggcgacgtcctgttcgcggcctacctttccatggctcgcgccggtctggtcgccctggaattctgggatccgaagacccagaaatggggccaagcacacatgcaggctcggtacagtattctgcgcaccttcctcgatgctggtgatgactttgttaagttgtcttacaagaaggaggatctctctgatctagagatccatcttgatcggtctaagatcctgactcatggacgtcctgccgtagagaagtacctccagaagctgcatgtctacaaaagtaccgcagatattgaggctggtaagggcttgtacgacgatattacctccgttgacagctggtggggaacctccgttcgtgaggtcgttttgaaaaagaaggttccacgcaagatctttgtgcaggccaatactattctggagggtgaccaggtcaccttgaaggagtatgaaccgaccctcgagggtctgattcagagctatgcagagcgtaacgtctgatatatttatatacagtatacaaatgaaatgcatatatattatatatctctttcccatggaagtagctacatatacatatcaatagcctcctttgtgatgtcttcccagatccgtttggacgacctttgtgtgactacccctattccacaccaaactactccaacagctcaggatttctagactaggtcgtatttgattctttccgctcccttgctattcatcgtaaaatccaagtcaagactatgcggcggatggacattccaagattgtacacaaaccctggactataaaatgatagatcaatagtacaacatagtcaggtggggaccggctgggaataggtcaacacatctgactgacttcgagtcacgcccatttcatctcgcaataatgttcctgtaaaatagaaactcgaaattgaatccaaactaaaacgaaactaaagtacaagacagaggacaccatatgtgccaagtttcgatggtgaggcgctcggacttaccgccgtccaagttgatctacccgtcttccccaacctctaagcgctctccttctccaacactcaatcactgcgaatctagcagatgaaagcttatatctgttcaactccctttggaaacaatcctttcttcaaccaggtgctggaagtcagtcattgaattggaaagactcgccgacacagcaacttggacgacactcgacccagatcagtcgcattgctagactaggtcagaattcgatcatctcgattgcgcatatcagcctgtctgactgattcaggcaataatagaaaccacggtgtcgcgagaaacgccgccgtcggacccatcaaccacggcgtgcccgccccatccaacggactccctagaggaggacgacgattattacactgcacctccaccgcactccccagcatcagtgtcaagttcctccaccgcatatcctccgccattttcgtctcttaccttttcgttaccgcaagacacaaatcgcccttacaaagttactgagcctggacccgcttgtcctccagccttagcgcctccagcacctgtcgaggagtcgctcgagccggccccatcttcggcagttgttgctgatacaaaagcgtctttcaccgaaccaaaaaacgagggctcttccgacgacggtgaaccaccaccaccatatacagaaggctatagtccacttgagtcattcacctacgtgatggctgctgcaggaggtgcctccagtataataacccaggtccagcagaccgggggtccgccaatcaacactcttggtggtatgtttgtaccactgccgcttggtatgctttgcgctaacagggtataatagatatcggcggagatgaacatgttggtctcgaccttcggtaggtcacaaattgatatatctcaattatgcatagtctaacaagttgatagtggtacgcgctttaccctttcgcgggatgagctgttgactttgcctgaatttgttctgctctccctcttccccaatggcctcctcccggatggacatgctgcaaatggtttccacgatggggatgtattcccggttgacgtacgcgaatccctatcttgagtattgaattctttctgacatttattatccagtatgacccagtctcacttcagtacatgctggatttcttccggactgtcgcccaaaccatccccgcatctctgccttccagctcaaactcgccagaaatggaaatgcaggacccattgcagggctcagcccgtgacatgctgcaagaccgtgctggcattattgttctccgtgaggaccttgacttttatgtgatccctccctacgccgatattggacacgatgaaatgcttgaagtcaagcgggcggccggcagatcactgttgaaacaggacggcatcttttctggactgcgcaagagcgaggagattggatcaaccgagcagcatcttattgaaatgctgacagctgggtgagtagaaccgggttctcaattatggggccaacgctaatatacaatatagaggatttgatcgttctgaccagtggggccaccgtgctccagagcccaacaaggcagtaatctgcagtcttgcgctggccaaactccgcactgacatccgcggagacctgtcaaacaacaattctgtgggcatggcccagaagcttctcctcttttggcgcaagcctgcccgccgctgctggtgggagggtatcgagctggacgacgtcgagggcgtcgagggacaagtaaaggtctggatccggcgtgtgtggactttggagatggtaagccccctattctcagttgactcaaaattcttgatagctaatcccttcgcagagtgttattgggctccgctaattttgtcccccttattctttcctttgcatgtgcgattatcattcccccggccttacggctcgaagtttcgactgttatttttttctaaagttgcattgaaatatgtctgcaacaaatattcaagtttccatcttaccagcagcagcgctgtactcagcattttggtgtactcattcctttcaatgtattcattttctagtcgattggtaaacgctttcatggacatcactttgacagtgaaggttggatatatggtgcagatctagtttgcaactgtagccttctcctcacatgtcgtttgcttgttttgtgagccttgtatccatacggcaataggctcagtccactacgtagcagaacagcaggcaaatgccagtgcctcttgatgatgctagacctggacttggactgcacgaccatggatgatcgcggtcttgacaggactctgcctagcctggcgcatctaaaattcgtgctcgaaatcaaaggttggccagcgggtgagtttatggtcacataggacgcagagctctgactcaggaaagtagaacgtgccgattgaaaccgcattgggcgtctaaaagaagacggtgtagaagccgcagaagaagtccgaaaaggccgcgctctgcacgcgacggcaccagactactgcatatagtagaatacttccgtcttgactgcacatctcgaacagatacgaccatacccaaccctaccggtctgccagaaatgcactcgaaccaactaagaatgccctggtatcgtgatgagctgtcgctgatgtttcatgatgaaactgaatccccacgatcatgcaagaaataccgaggcagtgatggtggactttggggaaccatttttcagaaaggtcctcttctcacagacgtccttctctcgcggatgtcctcttgttacagacgcatttcacggacatgctcgaatgaagcagatggagtgacggataagctatgctatacctttttgtaacaccatgctttttatattcagtgaccaagggagaccatttacaaactttgatgtatagaactacaatggttcggtgtgaggcatagcacgtgatgccctacctggaacaggactagcgtcgaatttggcaaagtcgcgcagaatatcgatcccagagccattctccagctgtattctttctggatacctttgacacgatcttaactttttttctaccacgttactatatgccgtggaatcatacaagtacttgttgttaactttcttgcgcttgggccattcccaattgtgcctcactgcagtgatcagcccttcgaacatcgagccgatcaaaacaatcgcaagctcgttcttttctcgcgcataccctcgaagaggcatgttcttgtgcaattgaatcgccaacatgtctcctcttcggggctatatcagttcctaccctccgcgcatgcgccattatggaaacgcgttgctcacacctgtcaatcctccgtctcaaaccggcccgactccgcgcaccacgaagcgtggaactacagccatcaattatgctgaagacggcttcgatgacgaggatttcgatgagactgatgggccccggcgcccgacgggactgcgaagtcttcggcgcgaagaatccgccactgacaagtcggtgccctactcggagaagctgggcaaagaagtgcatgcgcccgtggaggtgcaaggcctctttcgcgagtggatgatcaagagaatgttgcgaccagcgtatgttccctattgccagggctgatgtggccattaacgacagtggcctctgtcttccctgtctatccttggatctggctaacatacagcgtggtgattctaggtgtgccgatcaactgcagattcaagcgcaactccccttgacgctcgttcccatccgaattgatgtcgaagtccccgctcatcaacccctcgaaccattccccttcccacgcgcagtcgtggaccctaacgtcacccacgctcttcctgcctatcgcagacctgaaccattacccccgttccgcattaaggatactttcttgtggaacctccatgaatcactctcaacgccggaggaatttgctattggattcgtccgcgatctcgatctcccaaatccccaggctacgactatgaccatcagcaaccagatccgacagcagctggaggaatacgctggtgttgctcttcacccactttttcagagcacagacgcaggcacagtgcccagcgttctgccacatacagagccgtcaagagagacaccaacgacaccagctgctgccgttgcgacacctgatagccggcccaatgtgacgaccactgtaactgtgacgaaggaaccgctggtgaatgacagccttttgaacccagatgacgcatatcggtgcttgatcaccctcaatatcaacctgcaaaacaagctgtacacagacaaattcgagtggtctctgctacacccacctggcatggctgaagagtttgcacgcatcacttgcgctgatctcagccttggtggtgaatgggttagtgcaattgcacatgccatctacgaagcagtcttgaagttcaaaaaagaagtctgcgaaagcggtgctcttgttagcggctacggcaatgacattgacaatttggcagccaacggcgtggaggctggctggcggtacgaccctgaaaccatttgtgatgagtggcagcctcaagttgagactctgtccaaggaggaaatcgaacggagagagggtgaccgtgagcgtcagatccgacgtctgcgccgagaaacagccaggttctcttcaaccacgggcatcacacctgagatctcacgacaggccagtggcaattacttcgaggtggatagcgagactccgctgggacgtggagaaagaaacaagcgcaagcgccgattccgcagcttgagcccttcaggcagaagtggcactcctggaggccggggaactcctgatactggatcaggggcaggatacggtggcggtggcggcacgctctccgagtggtatgtgctgccagatacatattgttggaatattcactaatgattctgcttagggaacgtcaaagctggagatgcaagaactgcgcggtgtggggcacagcagtttgggctgtgcgtgatggtccagatggcccacgggtaagtctttactttagaatgtcttgcaaacagtctctaaccatcctctgtagacactctgccacaactgtggcctgctctatgagcgtgataaggttgtaccggaatggtccaaggatcttcatcgtcacgacgtgcccatcggtcgatatggctaaatcaacgccattttccttgcatcgccttaatgtactttcctaagcttcaatgaccttcctcacgccaccatttctcctttctccgtgttctttcaacatttaatccgctattggtgcactttcaatcgatccggcgttacggcgcatcgccttgttatgttgcagatcgatttccatccgcaaaattcgggggcgttactgtcattgtgaatccacatgtttctctcagtcgacgtctttctgtcttgcctccagcacatgttttcgatggatggctagaaggcaaagagctaggaactagagtagaaatgcaatcagattagccaatgatccactttgaagtacaaccgatctttgatattgatgacattaaaacatttgcaaatggtcttgtagacttacctccctcacatccttttattgatttatggatattctggaatgaagtgaaacatccctgtcttaattatactcgacaaggtcatccttcacgacgagcctaaccagtctggcactgactcaacaaatcaaccctcaaggaacttcagaatatgatcaaagccctcaggcgccttaacccaatgcccatccccctccgcacccgtaaactcctcccagtcaacacgtcccacaatcttcctcagaacctgacaagcctgccgcccaagctcaacagatacccacggatcatcagccccatgactcaaaaacacaggcgtctccaaaaccgcaccaccaccaaccttaccctcaggcaccacctccccagcaccagcaatctgctcaaaatagaaccccgaaatcaaactccgcgtctgcgcactcccaggcccaagctccggctcagacaacaaccactcaagctgctgcgcaaacggcaaccacccacaaaagcccagcagcccacccagcgggccctgaaagcggcccgtcgccgacgcagccaggaacgcccacaacgccgtcgccatgccctggctcatcccgccgagatagatattaccgtatttcccatctagcaggcgcgcctcgtcgtcgatgatagagaggatgttggcgatggactcgcggagtccggccttctgtagctcctggtgctcgtatatgttgtcgagtgagtatgcgtcaaaccacgcgcacatctcttctttaaaggctgtgctccatcggttgcgggatgttgggaacacccagcggtaggaggggaggttggacggcaggttcttgccgttggaggtttcggatgagaagagctctgaggcgaactcgccgccgtcgctgccgcggccgtgtaggaggatcacggtgtgtgtgtgtgtggtttggggtgggtggatgtgggatttggggaattccatgcttgcgagctgtttggatatgtgtttttggtgagttgggattccaatcggatttcggtgatgtcagatatgggggggttctcagctcccccgcaagatgttagatagcggttagcgatagcggtcagctaactacaacataaggtacgttatagacgaccatcttctgcagtataaactacaattcaagagcactctcctataacttttccttcctagctaatacccaatggaacccaacactcttcccacctccattatcctcttcccgatccaccgtaacctcatcaacctcaatcccaaacccaatctcaacaagaaccctccgcacctcctccctcccccacccactccaatgcatagcgccctccgtagcccccaaccaagaaccattagtcgagctctcaaacgcggcctcggagaaattcgccagaagccggcccccaggcttcaaccagccgaatatccgacgcagcatcgtagtctgctccatgcgcggcagatggaaaatggaatacatggccatcacggcgtcgaactgctctgcgctgaattccagctccatcatgtcgcctaggatcaggtttacggagggagagagtcgctctttggccagggcgatttgtgtcgatgatatgtcatttgcggttatgctaatgtgggcgtgtgaggatagcagctgggtgcagggtacgccggcgccgcagcctagctcgaggatgttgagttggtgggtttcttttgcggagtggatggattgaaggaggaggtcgaggtaggagaggcgggtttcgtgcgagggttttgtccaggttaggtagactgaggcgatttcattgtaggcttttttgatgtcggatttgattttgtggttggtggtttcgggcattatggtggttatagtgttggatggtgaatcgattaggaagaaaaccgcgtcagctactctaggcgttctaagtagatgactcattcggtgatttactgtctataaggctaatttacgagactggtgattggatattctcttctgattgagtctagccaaaaaaattagagtaggtagctgtcatttatattaacatgaatctccccaactgtgacaccttactctctcgggaaaggccatttccagttgcgaatatgttcagcatcaataccattatcgagtgcctcggacctgcccgcaatctgctcattgagcaacttctctctcacgccatcggccgtgttaccaagagattgaaccgagtcaatggcagccatagcgagactgtatcgatcggttccattgcgcacagccagctcgaacggtgtgtcgatgttgcccttctccttgtaacctctcacgtgcaggttatgttgacccacacgcttgtaggtgagccggtgaatgagccaggggtaggagtggaagttgaatatgatgggcgtgtcgttggtgaagatggacttccatctcgcgtcggacaatccgtggggatggttgacaggggagatcaggcggaagagatccaccacattaacaaagcggaccttgagctgggggagatgttcacggagtagggcagtcgcggcgagggcttcgtatgttgaaacatcaccgcaggacgccatcacgacatccgggtcttggccttggtcgttgctggcccagtcccagattccgagacccttggtgcagtgcgcgagtgcttcgtccatgttcaggaactggatgtgctcttgtttatcggcgacaaccacattcacgtagttgacactgcggagacagtggtccatcacggacaggagagtgttgccgtcgggtgggagatagatgcggaccacctcggggctcttgttagccactacatcgaggaatccggggtcctggtgactgaagccattgtggtcttgtctccagacagtggcggtaatgaggatgttcagggacgagacgcgggctcgccactcgatttccaagctcttctcgatccacttgcaatgctggttcaccatagaatcaatgacgtgaatgaaaggctcgtagctgttgagcagtccatggcgcccagaaagaatgtagccttccagccagccttcacaggtgtgctcactgaggatctccatcacgcggccatcgggggacagattgccgccgtccttatcttcctcgaagtaatctcccatccagactttcttgcctgccttgtacacctcggcaagcttgttagactccgtctcatcgggcccgaagagtcggaagttgtgcatgttgcgagcgacgatatcacgaaggaatttcgccatgttggccatgcctcccttggttgttatcccagggacgatatcgttgaaaccatagtctcggaaatcaggaatgtccagcgggcggcgcaaaagacctccgttaccaacggggttggcacttatgcgggaggtacccgtgggcgcgagctccctcagttccggaatcaatgtgccgttcttgtcgaagagttcttctggcttgtagcccctcatccatgtctccaagaccttgagatgagcggggttttcgcgcacatcagtgatcgggatttgatgggcgcgccagaatccctcgaggaggtggccgtcaacctcccgtggagcagaccatcccttgggtgtgcgcaggatgatcatgggccagcgggggcggaagggaaccttggagtctcgggctttcttctggtatccccggatctcggtgacacattgctcgagtgtggcggccatcgcttggtgcatgctgtcgaagtcacttccctcgacaaagtatggtttccatccatagccaacgagcaaggaggacagttcggagtgactgattcgtgcaagcacggtggggttattgatcttatatccattgaggtggagaacaggcaggacagctccgtcattgatagggttcaggaattttgtgctgtgccagctggtggcaaggggaccggtctcggactcgccgtcgccgaccatggtcagagtaatgagattggggtggtcataaaccgtgccaaaggcatgagagagtgaatatcccagctcacctccctcgtggatactaccaggtgtctcgggggtggcgtggctgccaatgcctccggggaaagagaattgcttgaagaacttctgcatgccctgcttatcctgacctttctccgggtagacttctgagtagacaccctcgaggtaagactgcgacagaattgcgggggcgccgtggccggggcccgaaacgaacagaacatcgaggtcgtatttcttgatgagacggttcatgtgcatccaggtgaaagcctgcccggcatccgagccccaatggcccaagagtcgagctttgagatgctctagcttcagaggttcttcgaggaggggattgtcgcgaaggtagagcatgcccaaacacaagtacatgctggcgcggaaccaggcattcatcttacgaatggtctcagcatcgaggggctttccttccacggttgagcgagcctctccataggcggagatgctcatttcatccgggattggtgtcatgctgtgtaccactgctgaaccagacatgttgcacgatatgtcggggaaccagtccctgtgtatggtggctcctggggttaagaaagaatggtaaacactggagttggaggtaagacggaataagaacacagaggaaaataatttcaggacaaggcggactttttttttctgttaataagcgggacaattgtttccccctccgactgggagccctatgggccaacgagtcaatgacgtggttgtcatccaacgcacaagcttcgatggtgctacggcgcagagataagcatgcaatccgacccactgccctgtgcacgtgcattattctggcattcataattcttgggtgcttacgttcggtgcctgcccggtgaaaaagtaactaaaaatagcttatttatgcacagtgtaagtgtcatgatgcatcaccggagaaaccccgggaacattcgcgatcgtacgacgtcgccttcgccgtgaaaccgcctttgcccctccgaggccttaagaccgttaccccgcacccgacaccatgtgattcggccgagagtggggaatatcaagtgtcgatctccgagaatcatctcatattaagtaacggacaagtcaacagttggagaacattcgaatcaagtagcagaattcaatccaaaaagtcgcctctggtctcctccacaatcaactcgtactccggctcaaattgcatatacatggcctcgggagaacctgttttttgtttagtataatacgcaacttcatcatccaccaaggccttcagcattccttcgcttgcaccaatcgacccaggtgctatggctgactgcaccaagagctgagtctgacaggccctctccaatgcaataaaaaaggccgccgcttcggcaaccgtcccgcccgccgtaagcaatccatgattctgcatgatcaaattcttgtgcttagggcccagggcatcggcaatcagttgcccctcttccttggcgaaagcaacgcccccaaaagctcgatataccgaaagatcgtcgtagaacatgcaggaatcttcaagcgggaaatagtgtcagtgggaatgtggcgtgcgtggcacaggtcctcttaccctgattcagcatatcaattccccggccaaaagtactccaggctcggccgtagggactgtgcatatgacacacggcatgaatatccggtcgcctctggtggattgcggaatggataataaacccagccgtgttgaccggccgcaattcgccagtgatcttcgttacgcccgagacccgattgccttgttcgtcgacccgcaccatatcagagatcgtgagaaggccgaagtggactccgtatggattgatccagaacgtgtggggttcgatggggtctgtgtgtgcggagtggtgttagaacatgtacaatataggcgaaggatcgcgtaaagcaagcatgcatacctcgcacactgatatggccgctgctaccatctgcgaatcccattttggcaaagatgcgaaacgcgcccgccatctgcgcgaggagccattcccgttcgtcttctttgtcggtgggtcttgggatgtggtgcagcctatttacttcaccattgtcacttgtttcggtgttcaaagcagaagtgtttaaagcaggagtaaccggctttgctcgatctttagacacgtatgataacatcttgtgcgcttttgatttgggtgagtgaggaaagatggtgggaccgaggcaaataaatactaccccgcggaaccattggctattcgatgactcgacgatttttgtatatacaacctatcaaaggacagctacgtctgtattcgcctttggtggaatagaagggtctacttgccctattcgtatggtcctccgtaccactgtcggagattgtctttaattaactttttgggcggcagatttgacctggaggactccgtaagtggagaagattgtcatttccacatggctgcggctggacactagactcgagtccccgctagagatcatttcaattgaaaacagttcaatatgagtggtccaaattcaagaaagcaaaaagtccagagcagcgcaacatataatcaaagacaggccacccatctcgcaaattagaacagactgtgccctgtcgccagattcgggtcaagatgaggaaagtcatcaatcggacgaacacgtgcaactgggtagggcgcgttcaattgtgccggtgtcgcggtaggaagagtcctctggccctgtgggatcccagggttatagtcaaaaacccaaagacgcaacgactgatccggacaagttccagtatagaacctgtgccgcagccatgaccctaacagacgatcagcgccggcacgcgttgattgaccactctgaacacaagcggatatcgcttgccagtccggggacatccatttccgttcatcgtagctccacatgttgacttctatttctcggaatatcgaggtgactcggttcccatctgcgagataaagaactccgacgcccatgcatcggggcaaggggtatacgggtccactttctgcttccagattccgaagaacgttgatgtcgtcttcgaataggagcatatgtgtagccccggtgtcatccataaatgggaaatcaaagaaaggtggcctgcttaatggttttgggtctttttcccctttttccttttttctctctccttctcttactgcaatcgctggaaccttcgggatccgaagggcaaccctcacctaaagaggatgattagagagatcactaaagtggccaacagggcaattgaaagggaatagctaccattgtggcattcaaacgtggatccggttggcataccatcgaagccttgctcatgctaggcccaggcccgagaatctgagtatttgttttagtatatctatcgacacagccaagggtctgacacttacaccttcaacccaaaatcctacatgtccctcgtacttgtcatggacgtagcggtattcatcccagtggaaaggtctcggcaagcagagctggactccagaataccagtaggtgacaaggtccggattccaactcaattccccggatcgataccttgcaatgatggctttcaccgtactgaccatcttgtactcgtcgttctcccccgcgagttgatccaatgtgaatttgagatcatctacgcgctgtgcctcgggccaactcaaacctggctctctagccatcagtctcctgggtaggaaggagtaaattagtctctattggggaattcggagttataggatggctcactcgcgttgcgactgctttgcaatgaattctttcattttatgccgataaacatgaggcatgatattctctgcgatccgctcacgacacctttctatctgagctttgaagtcgctgcataaaaggtcaataccaagtatgaaaatgaagtgagccagtatcaactagctagagcaggttgaacttactcgggcatcagatcaggctcctctgggttccagcctttaggcgtgtcttcgagctctgtgatgacatcttttaccattggccatttctgtttcttgggaatttcttgtctaggcttcttccaggtcttcgagtaatcaaccttgagatcggctgcaagaagttcctcgtttaggagttgcgggattcccgtttctgtttttgccttcttcggggcagctccttcatcttccttcaagcttttcttgcgttttgcattgaccctcttgggggcacttttgccgtcaagttttgcggcccgggggagagtagcccttggaggcatcttgcaacagaagatagtcacgaccaaggtgctttctctatgtaactagcaggtcgaatattgaacataaatgaatgatgagtatgaatgacagaattttgagggtatttgtattccattttgtgtacgccgagcccatcgcaccggactggggtttgactatgctgtcaaagaaaacttaaaaggtggtaaacaagatagaacaaagacaggagcatgcccttggagagaggtcgattccacttttccgtgcttttgaaacaccttattgagtgtgtttttgcaaagtatactctcagtggatttgactattgcaaagtatactctcagtggatttgactaggacgattctccaatatgattttggctaatttctttgatattgacagggcttatgctgtttgctgtttgtttgggctctgtctgtgcgaccttctgccgctgtacctgatgttaaaggattcaaagcagcaggatttgtcaaacaaagacttgtggattcaaacccaaagttcagatccttcactcggctcactttcaaaatcatgaaagaacattggctaacttgagctgacctgtagtcatgagaatgagagctgaaaatagattgtggcgcgataaaagacacgtctcagggcgagaaagtgtagaggctggagagccatggagaacaaagaagatctgattcttgccctgtttatttttacacaactcggtatctttgcccagtgcctcacatatgtgatatattcctctttattaagtattttcttatcgtggagtgggtaagctgttgagcctcagtcgcacccatactgatattattgagcagtgctttgttcatcgccagagatgcttgtagcgaaagcctgctgaagctcaatgtcatacctcttcttatcagcaagtttgcctatcacgaatcttggcaggtcttttacccagtaaaagggcatggtttcaccaatttcatcggagcgatgcttagacaacaagggctgaatatgcgaataaaacagatggaacaagccggtcgggctggaaaggccagggaataccagaatgttccagttttccatgcttgttccataacctctgatagtagtaatggcgtgctcccgacctcttttgacaggatactgctagacatttgtgtctcctcactcttcaagatagacatcatttccttgcgagcttcatcaaattcatcgacttcgatcatgtccacagctttattagtcaaccagtaaggaggtgcgaccatttcgataggtagggagcaagcccattccagatcgaccagacaagtgatatgccacttgtcatcaacaaaaattttgctttggtggagatctgtaagtgtgagaacaaaaggcccacgacacaaatctcgacgaaaaaacactggaattagagttcgcattgctgccagtgctgacatctgataaacgcagtcatgtatgtcattcacggaatttagttggtttcgtagacgactgtcatgggctcctaggatatccatcacgtaagactcaaccgtgttgtatgtatagtcacgggatatgtgggttggaacgttctcattctcgaggtcctgaagttccatcgagagaggacggttgcttagagttaggaacccgtccctgttgatgatggatgaactaatgcgaggcaggggggttttgctgaggctcagaaagatcctggacaagtcccggaggaaattacaccgtaactcgctgtcttgttgtttctcggaccatgtattcgcaagcattgtcccttgggtttcttcgatgcattgtagcaacaagtatccagcactagcaacgcgaccaggaagcgcttccgtctgatttggattgaggatatagttcgaaggtactgggaggcaaaaccagtttagtagccggcggcgtagggattggaagcaacggcccggaaagggcagttggtccaattctgtgaactattctcgacaattagattaatatattggagatggagtaggtctcgtacagtttcacctgtagacaacgcgaagccatataaccgtggaattggaatatccgggcaattctgctggagccatgcataggtcccagcttcacattggatcttttcatccccgttcccgggcctaaagtcatccccgatacggtaggggagcggaaatcggagtatgacccgttttcttggttgctgtctactgttctggatagagataggaatgcagatattgaaactgccacggagccagtacctcacttctgaaacatggcacttatcgcttgagctcagccctagtggtgagcaacagtagctttcatccactcgcgtctatcgtcgagatatgaaaagaagcggtcttgttggccatagtagcccaaatggtggagtatgtcactctcctgatccttggcgaaagaataggtaatttctcccttgagaaggcggcgcgtcatgattgggagcaaaccaaggtgctacccggactagtattgactttggctgtgtccccacaaagcagagttcgtgggtgagatctggggaaggggcgatcctcccgggacggacagatgttttgccgaagtagcgaatatcatcagccttcgggcacctgacagtcctggaggtaagcttagttactttgtttctctcaaaatcaggtgttaggacgaacacacctcgaaatatatagtcagaatgcgagattcgttgatttgcgaaaaagctataaaaccaaaagtcaaccctaaacacaaagccgtatatcttgcgaaaatgtaaggacgttgcgatacgaagtttagctgtagttccatatctcgattatatgcaatcgatgcctcattcaagcacctttgcaggttactggtagcgtcaataatctcacactgctggtcaaccgattggccgattcagtacagtacccagaacaggcagttggttattgcatagcgtcggccctaaatgccaaatctaaatatcaccgttttcatggtagtaaagtaagaagaagcatcaaactagatggaaagttacataacagccatctagtatacaacgcattcataaaaggacaggatatcagctcataacaaaccaaccaaaaattgcaaaactccgctaagcaaagggagtgaaaagtgagcaaagtctaagagaacaaaaccaaaaagtgacaacattctgagattatcgaaagcaaaaagcgggagacattcagcttctcataaagcaactcataacctatattcaagacgaacgggagcgctgagtcggcggagctcccaaaggctcctgtattgatcagtcagtgatgaaacctcttgaagattcttttgcggagtaaagtacgaaccgagctggcacgacgcttgcggccgcttcgttcttcgccgacgttgtcagtctcattctcagacctgcgagcctcgcgcccgacgcaaatgctgttgtttcggccgttgacccggatgcccgagagagcgcgaatgttgatgggccgggggtagcccacatcgtcgttcagggcatttgcgcggctcagcgcagcgatgatgacagccgccatagagttaatacggggggatgttggggcctcctggggagttgaatcagtgggagtatcaactccagaaggcgacaccatgatggtgttttcgtcaccagttatggtgatcgagttgtcaatgtaaatattgattggggaagcccatggctcgtccatgtcgttctgatccacgctcatgacagttgtgccgctgggtctggtcacagacaacgtgtacgggggtggagctgtgcctagagtggacgtagaggcagacgtagatatagaagaagtgttgcgatttgcccggacttcggcgagcttacttagatggtgtcgcaaagagtctgatggaggcaacattgtgaatgaagttatgatactttttagtcgtgtttgtagatatgaccagagtgaagtatggctgagtgaagaagagaagtgcaacagcgggttatctgagtatttatggtcaagcgtttgttcattccgtttgaatgggcgcaaacaataggaaaagtacaatcaataaacaatcaatagacagccaatcagaggctgtcaggggccattgacttgcctaattgggagccttgaatggatttctattgttctcaatagagatcacgtgactgctattgttcatggggtatcaatagaagaaaaactatgtacctggtaccttcgccaagatgggcaccaccgtaatcaagaaggtacatgtacatccagtaccatggtttcgctagtgtagaaaatgcgcctccaattgtcttccaaaaaagcaaaccgggacgctgcggcggtccaccagcccctgactgtggagcagtccttcgtagagcgtgtttgtgtcactgtaaccaaacgaactggatcccagatgatcggatgttccttcttcggccggtcggaaatctctgctgatggctacaccatctgggaagtgggcacgtctggtcaggttattggctggtatttcacaggcgcagggtatcaaaccctaccgataaggttgtgtggctccttactgctagacgggatatcggagccagagtggtctgggtgaggttggcccgggtagtatcgaccacctgggtgaagtgattgcaccgtctgcaaatacttattagcaaggacaacagcccttgtagattgcccgagttataccggtgtttctgtcgcgtccgacatccgaaccgttacgggttggtactgacttcgcggaaatcatccccttcaacttccacctcgcgatctcgaatccggcgcatcaaagccatgaaattgctttgttggaatttttcacttgtttcgttgcgcacgctgtcgagcagttgccctgctgtccgcgcaagttcatcggcatctcgattccgtgtttctggatcctgcttttcacttttgggaatgagatccgatccgagtcgaatatgctcttgggtaactggctcaggaatgccgacttcattggtctcctgcgactgcttctgagtatctagttgagcagcatcgactccttgcaactccatatctgcccgggcctgatcaaaggcagcctcaaaggcggattcgtcaaactgttgcatgtggtgttgctcagtctgcataacctgcgagggctgcatctgattcatggaggatccatacatctggtagcttggtgcaaaagctggttgataggcaccatgcatttgcggggtttgctgtgtctgggacataggccctcgttgttgggtcatgaattcagagtgccacccgccatgcgccgtggctggcgcaatatttggtctttgtagttgcgctacagggtgtgcgggccccgagatttgcaagttctggaagtccgatgcccaactggcgttggctgcaccatgtgcagctggatggtgtactgcagcatgatgtgatggtgctccaaaatgggccggatgttgtaagttaggcaatgcagggccagcaaagttgccttcgaatgcggcgaactccgggtcgagtattccttcttgggggttctgggatcggaaaccctgtagtatgcgtttagcatgaatgaaacaatgcaatcccaaaagagctaccaacctgagcaggcgattgacgggaagtcaaccggtcttgctgaagggtccgatcaacagaggtatgcttctggaagttctgaagggcgttcgacggcccgcacagcgcatcacccataatgacctgcttagatcgaccaactgagcaagaaatgtgatatggtgactgtggctttcaaatctctctgtaatcagtttccaggacagattgcagcaaatataggaatgaaggtgtcggacttcaaaagaaactccacgccaccgcgtcgtggggttaccgatgaccgaggctcatcacgtgcatatatccaggtaacgtgacctagcacacgataagatacgggaagggccaggttgtttggctaaaagggagagagctaccccgactccgcgcgctttcacagctattaacttcttgtttgctttatttattcaacatggtaactaatattccgccacattgctttgagcttgttccacaatcccatcgctaacagcttcaaacctccaggcggcccctcaggtgatctcgaattccggacacgaagagatgattgtatgtgctaagataggaattgcaactggtgatctatgtggttacacaatgtacgtgagctaactacgtatgttgaatagcacgatgctggcttggactattacggccgccggttggccacatgttcatccgacaaaacgataaagatctttgagattgagggagaaacacaccgactagtcgatacactgaaggggtaagctagtcctatcgatgtgtgcaactgggtgttttgtctctaacatttgtggttgatagccacgagggtgctgtgtggtgtatcgcatgggtgagttgacaccaaaacatgagcaattatagtgcgcaatgtgactgaccatgcgattctctcgatttaggcccaccccaaattcggcacaattctagcctcatcttcctacgatggcaaagttctgatctggcgggaacagccccagaatgcgacctcgccctccggtggtagcacatggactaaggtcttcgatttctccctccacacggcctcggtgaatatggtttcctgggctccccatgagagtggatgtcttcttgcctgcgcttcttccgacggccatgtcagcgtgctcgagttccgtgacaacaactggacccaccaaaccttccatgctcacggaatgggcgttaactctatcagctgggcccccgcggcctttgctggtagccttatcagctctaaccccgggcccggccaacagcgccggtttgttaccggtggcagcgacaacctggtcaaaatctgggagtataagtatgtccattgataaaactttccaagcatacagctgtgacgtgaactaactcgttctttagcgcggagtccaaatcttacaacctcactcaaaccctcgagggacacactgactgggtccgtgatgtggcctggtccccgagcatcctctccaagtcctacatcgcctccgccgcgcaagacaagaccgttcgcatttggacctctgatgcttctaacccgggccagtggtccagccaaacattggagttcgacactgttctgtggcgcgttagctggagtctcagcggtaacatccttgccgtcagcggaggtgataacaaggttagtttatggaaggagaacctcaagggggagtgggagaaggtcaaggatatcgaggagtagtggctgttttaatttctatgtgtcatctattcccttcctcaacgcataattctgttctattcaaaagctccattgcttgttaccataaatattgattccagcgaatcctacgcaatttccagagctttgggtgagcttgatatgtttcattccctatctcgtccatctcgtccaccgctcaactcccagaaaaacaaaagaaagaaaggcattaaataaaggcaaatcaaggcaaataaaagagcaaataaaaacgtagaagatatcccgtgtgtctcaagatcagcgcatgactggcgctagccctcacacgtcccagaagatgaatgggcctctggcacctgtttccttcatatccaaccaccgtccaagcatcaggcgcccaccggggatgataacagcctcataaccatggatccagccggggccgtccattacgaggggggaatgcttctcttcatcatcttcatccgcttcggcgatgataaaacagatccgcatccatccctcaaagccaccatgtgaaacagcaatctcttcggtaaacccgaatacgtggtttcccgcctcatgggcgccactataggctctctgcttgccatcgaaatatgtccgtttgatattgcggcctttagcgagaggcatgatcttactgcattgcttgggccaaaactcttcggaggttgcgaggtcaagggtctgacatttgttaatatagccttgcaagaaactcgccttccactcaccatgatctcgaccccgtcaccgtgtgtctcaagatcagcgcatgactggcgctcgttgtcttgcaggtctgatatcggatgcatgcatgctaattgaaatttgaaatcagctcggggtcatgattgggttttccccctgttggtatactcacagtagtatcctagccacgatgagcttagtttggattcctcgattggaagctcctttcgtgtcttgggcttcatctctgcaggcagcgcggagaaggattcctggaaggtgaactcggaggtgttcaaaagatgacgttgccagaaattgcgcaggttcagcagtttgacgagatcgagctttttgtggtcgatatatgccttgcccagcttctctccatatgcgtaaacctgtttgatgtcgtagtcggttcgacggcagtgatcggtgatcgttggatcgagagcaaacgcactcaggctctgtgtatggatatcagtgaatgtccaatccattattcgacgaaacatgcgtacaagctggagaccataaaagagttttgaggaaggttctttctgaaattcgctcaaaaaatccaccttctcgagtttctcctgtatgcattgcagggtctttggggtcgatccaggaacgatggttagttgcagagactcctcgagcatagtctgcatgacctccatccagaggaattggcgatcatcttccttctctttgaatctgatcgtagcgcccagcacaatggcacggatttggtattcgatcttcaactcccctgaatttttccccggaacaatatcgtagtgtttaccaaagagatatcgccagacggacgagtcggacccgaagaccttgttccacatctctttgcaagactgggagagatggaaaacatcacgatcgttagggagatagcatgcaatgtcctggagaacctgttgttctcaaacattaatagctgcaacctagaactatagacatatacttacctcattcggaagctcgagcagtcggcttggagcacttggcatggcaactgaatcggaccgcacggggttgttggacgacatgtctgtagttgcggtattattcggtatgtatacctatgtacttcgatgtgaggcggaagatgtgaacagaagacgtatgtgcaagaacaaaattcagaataaaaggcgatagatattcggcgcgaacgttcatgtatagcattcggtgtgtttgtctatgcactttgatgtaaggtagaagatgtatgaagggaggatgtaagtgcaaagagcgaatttcgaatcaaaggcgagaggtattcggcgtgcgccttcacttgtccatgtggtatagcatttggtatgtatacctatatgacgtgaggtgaagatgtgaacagaagatgtaaagtgcaaagagcgacctaggaataagaggctacggatagtcagcgcacacgttcacttatccttatgacatagcattcggtatgtatacctatgcagttcgatacgaggcggaagacgtaagaaagaagaggtaaaggacgaagagcgaatctgggaataagaggtaatatatattcggaccgcgcgttgtcttgtccttagagtgattcatttcgaatatgcgatatcatttttgatttcagttcgaacatcgggacaatatgggtccgcaactaaatcgggtgaagctacttatatttgcgtgatgagattcgcctcacaagtgacagcgcaacaataaacgataaagagcgacaaagaggtccgcggttcgaatttacctcttcacgttccagagattgatagattttcttcacacgctatatatgccgtgagaggctatgtcgctgtaagctttctttcacgccccagccatctgctaacaggcccttgacttcctctaggctaagtccactcatctcggggtagattgcccatacagcaacccatccacccacacagacgagtgcatagagagcaaacgtccatgagggagagatcaattccatcataggcaagaaagtaagaccgatgataaagttggatccccagttggttgcagtggccagtgctgaccctagggaacgtacattcagagggaagagctcagactgctgccaagggacgttgccgagcccaagggcatatgccgccgtatagacagtaaggcaaagcagaattgcaaggggcacaagggaattagtgctatcatggttttcttggtgatcagttggaggttgtggattccatttgccatccattgacgagaacgagaaagcacagacgaccagagcaacgaccatgacaggtattgaatacaggagaatgcgccggcgaccgattctgtcaatcagcacgaatgcaagcagcgtgaagataaagttcgtcatagccaccgagagtgatgtcagtgtcggcgacgagaacgaaagagaggagaagatggttgccgaaaaatacatcaagctgttgaatccgcagagctgttggactgcctggagcatcattgctatgatcaatgctcttctatttccaccatgcaacaactgctgaccccgttggatggtatcatgcaaccactggggctttgtgccacgagacttaactggtcccatctccgacgcctcttggacaatttccgcgttgatattgcgcaagacatgatccaccacccggtcacatccagggcaatcctgatagatcttggacaggactgtcttcgctcgggcatcaaatccagcctggagcagccatcgaggcgtctcgggtagcagagcgaggatggcgagttggaaaaaggccggcaatgcaccaattcccacaatccaccgccaacctccagttgtactagaaaacagccaaccgactatgtatgccaccacctggccaccggtgatgaacagactgaggatcgtcacaagtcttcctcttgcgtgtgaaggagctaactcggatatatacctgattacctagcatgttagcaattaccatctctcttgtaatcaaattgatgccatggcacaggttctcagtccccgcctgacgacaaggccaacctacaatggagtcaccgcactcgcgctaccaacagcaagaccaacaatgctgcgtccaaggatcatcccccaaacctggcttgtaaaggcctgtaccaatgctccaagtgcaaacaacagatccgccccaagtatgactttccgacgaccaaacttgtccgccagcactccggtgaacgggctcgcaatcaacgcaaataagctagtgcatgatgtaatgaggcttttatcgagtgttgtcaatgttcggccggaaaggtctgacccgatggtcaccaaagtagacgagataacacctgtactggaagtttcaacgattgttagtgaacgggaagcaatgaagccggaacatggcgtgtttggtagtagctagcatactcatatccaaatagtaggccgcttatcccagcggaaaaagtcaacatccatatgaaccagcctcctgagtattccagctcagaggccaggctctcatcgtggtcattgccatcatggtcggaataggcgtgggatgaggcgagcaaaggggcgtgggggcccgattggtcttgctcatctgcgcctgtcatatcttcgagctcttccaacttgatcctgaggtatcatccgaattttcaatgttatgcccctgatcccccgaggcatctgagatggtaaagtgacgtccggggctaatcgcgataagccgataaggagacgctcaaagcccgaagcggaactcggattccgcacgtcgatacagttcaagaacaactagagatctatttccatacatatgcactaggatggaatgaaggcctaatatatgaatattgggttgcagaatactaaaagtgtgtaatttagattcatgcaagattcattgtttttacggcattaatgtatacatatatagccctcctagcctagtgtttagccacaacaccggcagaatcagcctgtgcgctgatcttcttcttgtatgcactcacggtgccgtcaaacttgtgaacagtaccgccgtcgcaaacccagagactagtgcagacattctgcaacatggtgacatcgtgggaaaccatcaccacacctccctcgaacgcccggagtgcatccgacagagcatccataccctcgatatccaagtgattggaaggctcgtcaagaacaaggatatggggattggtcaaggacaagcaagcaaatgcgacacgagatttctgacctccggacagtaattccatacgttggagaccagttgtaccagtgataccaaatctataatatgaaattagtcaatgcagtacatgcgagtggtcaggataaacttacgctcccaggtgtcgtcggtactcctcgtcggttttaccgggatatgtcttggtcatgaagccgactgcactggcattcatgtccaaagcatcgacgtgatgttgggcgaagaatccgatgcgcagtctcgagtttgtggagatgataccgcttgttggctcaagctggttggtgagtagtttcaggactgtggtcttaccagcaccgttaggtccgacaattccaatacgcgaatcaagttgaacatccagatcgacatccctgagaagaggtttgtccttggtgtagccgaagcaaacatcagacatctggacaatgggtggtgaaagcttctcgactccagggaaggcaaagtgaacggtgtactcggcctctggggcttcgagaactggcatgcgctcaagtttcttaattctcgactgtgcctcggaggacttcgcggcgttgtatcggaacttatcaatgaatgctgatgacgatcgttaacacagctacgacaagatggagggggtaacgaaccttgcaagtgagctctttcgcccaactgcttctcgtattcacgcttagcagtcttccggcgctcctccttggtagcgtagaaggattctgcagattgttagaacaattcatagtcttgagatctgatgtaacttaccgaagttagcacctctgtagtagtccaacctctcagagtgctggtggataatatccgtggcgacttcgttcaagaatgcacgatcgtgagaaaccacaaggactgtgctagggtatccctgaaggtaattggaaaggaaagtaattgacggaacgtccaacatgttagacggttctgtgaaatgtcagtaggccgcttgtagaatagagagcagtggtaaataccgtcaagcaaaagcaaatcgggctcgcagaatagagctcgtgcaagagacaaacgcattctccaacctccggagaaggtcttggtggcgtactgctggcgctcttgggagaaaccaagaccagccaagatactagccgcacgagattcagccttatcagactccatttctgagagctttccataaatatcgctcaaggtgatatccaggccctcgcgctcctcgtcaagtctagcagcatcctttgaagtatccgccaatgaagacctttcttcttcgatggctgcaagttgttttgagattttctgtagtcgttagcaatatgccgctgtgacatcttgggacttgactaaccgcttgctcggataggagatgtttccgccacacatcagcatccaacactgcttgcaaagctggtgtatcatcaccagtaatctaggatagaaagtcagtaagagaaaaggcaaccgagctggatttgaacatacctcttgctcaacgtgaagaatagaaacgtgagtcggaatcgggatttctctgcgactcaaagcacgtaaaagtgtagatttaccgataccgttctgaccaacaagaccgtaacgacgaccataagcgagtgtgaaggcagcgtctgtcaaaatgcgcaggccactaatcgagatatcgatgttatccaacttgatatccttgctcttggcctgggagtccgagcccaattgaagagggttgacagccatgaagaactcctcgtaggacatagcctcgtctggctggttgagcagacgggacgcctcgtaggtaacgttcttcatggacttcttgtcctgcttggcgcgaatcttgcgctcggccttctcgagcttcttcttgtccaccttggactccatctttcgagcattggcagattccaagtcgacagtgtttccagtcagacccagtgtagaagacatgttccgctgcgcaccgacactgatagtctgatcaagctttttagccttgaagggcatttgcctccgctccggatctccatcggaagagctcagcgtcgtaatgaactttgcaactaagttgccgatcgcttcgtagttttgcggggagaaatctcccgaagcggagactaggaggttggtcacggattcggcggcctctgccaagggcgactcggcactggcatcgtcgacgtagaggtttgcggcatgagtcaggtagccctgtcaaatagtcagcttcaactcacaatccttcaccgcgcatatgtgcggagagacgtaccactgagtattcggtgatgatgttgtcgatgccagggatctgggattggagttcggactccatattgccaggctcgaaaggacgtattccacgccgggattcggggagcttcgaggtcaaggttttgtggagttctacaattgatgtccccaccgtgaatagtggcggatttttgtatgtgttatcgataagatcacatgatatgagtgtttatcgttcataatatcctcggaaagcttcttatgttaattgtctcttgagataatgtgacagatattgaatgctaagtagtgtaaatcatattcctagctttgagaaacaccaaaacaaatgagaggcagctaggtagtgatttctcatatatttgcgactactacactccataactaccgaaatataagcgatttccataacctcaacaaagaactttatgaccatagctttgtttcgaagtacttgatattcgaagcaagctgtcgaaaactcaatctagacaaaaatgagattgaaagtagtttgctggctgtatatcgccaatcttcgcatgaagctgttgaatacgaggatccatctatattattagcatcagattcccagccaattagttgattgagcacagatactgtagccaagttcagaatgacctcttggcatttgtgatatacttgcatacgggaaacaagcatcagatcacccgaatgtcacacagccccaatatttgaagtccttaagcgatagacaaagtacagagtagacgtagcatacgggcgagtagcataatgatcagcttagctcctgcggcctctccggtcacgttatgagcaatacgaggttttgcgatgatggacataagtaaggttcagatctgaccctgttgcccaaagatgtttcggctactctgtgcagctaagagcgatagacatagacggtgaagtggaagatatggcctgactagattactctgcatcaatgactggactctgatgaaattacttaaattagatggctcttgcaggcaggttgtaggtgtttcataagcagtttcacgttcggagaaactgcattggaccaatgagcagtaggtgaattatgaacaacgcagaggtatcggttacttaattaacaatcaactgcccaatgaacctatacaagcttagaatctggaagctgttcaaaacgcaatttccacccttcaccaaggtcggaaattgcaaagcacgggcgtgcaaaatcggccgagggtcggaaggccgagaattgatgtcaccagggctagaggtgaatggcatctttgtttattatgtgattcttttccaacaatggtcagaaatggccattcgacctggatatttcaagatcaccaacagtgcagggaatatcttgttccggtctgcaggtcgctgcagccaacactgatataacgggtgacgacaggtgagaaaaacaaattaaagtattgggtcatagttacttatgaacagttgacacgggatatgtaaacgtaaatcaaggaactgtccggatggacgctccatatatcgaccttcctaagtgaatgattggatctgccgatcgctagaagttcaggtattatgtagggatcggcctgaaccgcctttcaggtgaaaaaaaaagagagttaaagagcttgaacacgaggtacttcttcccccgctatttgagacactattgacggttaactgccagagctagaagtatgagtttggaattaggaattgtgcttcatcaggttcctttgatctgcaaaggggaaaagagagaaaaggggacttttatatatagtaatgtccccaaaaacaatagcaccgggtactatatcgggttaatttataaaatcgaacaggtcaactcttgaacctaagatcgtactctaatcttcggaccaaattcggaattccaggatcacgctcttcaatatagcaatttaaaggtacggggtacctgctggagcccttgcattattgaacctcctcgcaacgctttcagtccattctttgtcggatatttaattccagaagcaaagtcagcaaagtcagcaaagttagtaaagttggttggaagtggatctggatggtgacaaaccagcttttcactcggcacaaagtataggatgacagcttaaccgagttgatagtggatagattcctgaacaaagcctaaccgatcatcctttgatccattgttaatctcaatggaccatggttcagtattagagaacggaacacctgcgggctattcatagccagtggacaccgatcggcttgagggccccttcacgatgcgactaacgatcctaggctagggggccgagaacgcaatctcagccagccaacaccagatgtgtggggaattctggatcgcatggctttttttggggcctagtggcttctccatttccctgctctttagggtgctcggccagtcgaagcggacttctccggttgcttgaaatgtctggactatgacgccaatacaaatgtgagccgcaagggacgtctgccaaattggcgcatcctcctctggcctgcattctgcatttgcaacacctgcaggatcgtgcaccagagctagtaccgtttcgtgctgccctgaagtgctgtgcaaatcggggtattcctctcctgtctgtagaatgtctggtttgttttgatagcagaatcttccctagatcttcgatccccggtgaaatctttaaatgaatgccatccaaagacagcgacctacttcataattgatctaagatcaaataaatcacaaaaggacccaaggagggggagttattgaaagttgctcctagcgtgcgcagggcgggagttgataatccccgtgtgttgttgttgatttccccgggtcacatccacttcgtctggtgttctccttctttactcggcctcccagggggtagaggcatattatttttcttggaggctttgctcggcgttggccattcactctttattttttaattctttttcctttgctttgtctggaacgtcaatcgcggcctgggtgaggcagcgcagcacttcttcatcaccacccggcttgcgcaactcgcaattcgccattcgacctttcatctacctcttcatcgtttgcctccatactcttttgtattgtgcatccatctggaatgtcattcacggagcttatcaacctggagctgatcgtcggggtgtttgacatccttagcggcgtcctctgaggatggatcacatctcaactgtaagtccccgagttgatatcactttgcaggacggcggcctggtcgcttcggaaccttcactaactagcatttttagctctgtgcattgagcacagttggaatagctcccaccggtcttgcgctcggtcgcgccgaacggactcagaggcctgggctctttcggcgaaagactctctttcaggatatcctcgagccgctccctaataacagtgaacagacagcagtcgcccggcccaaaaccgctctctcatcccgcagtccggccgccgagtggcttgccgcaaaggaacaggaaagcttgcagggaaaccaagaatccaatctgcgaaaagcgcccttgtcgttcagcggtgcaagacgccgccgtcggggtcaaactctcacaaacccacccctgcggattccggaaaatgagtcgactgactcgccggtcgaaatacaaactcagcggccatcctctggttggctgcggcggctgtcgatggcctcgttccaagctgaaaccccgactgcaggtagtccaacaacgccctcgttcaatgggtcagaaagcccactcgttcctcgctcgccctatctgcgaagaaccccaaacaaattggtgaagcgaccggcttcgcaacatacaaatacgcatgctctctgcatgaaccccatctctgaaccgtcgccggctgcgctgcgcaggcccgccactagtcaccagaggtcggagtcgatgttcctccggacttcctctacaacggacttcaatgcatactttccgaagacgcctgtcgaaggtccagcaatcgaagaattcgagctcgaaaagaagaagcactggatgccattcttcgttcccaaagctgggaaattagcagagaggctttcgcgcaggttctcgacctccactgccccaaaggttcagagtgtacgccaaattgcgtctgacaatggcgctcttcctgtgttggttgcggctaatatgatctcccccacggctgctgcgccagaagacatatcagtacctaataccccaatcgaattccgcaatccgttccaaatgcctatctccgagccaactcccaaggagtcggtcgccccggaacagcaaacagcgaaatccggccataaacagtcatactcggttaacgatattgagccgaaaatcatcatggcaaacacagtcactgcccacgggacaccgattatgggacccgttcgcggcggctctctgaagcgagtgaagggaaggaccttttcgatccctgcctccgagctctcaatggaagagcagaatgtccctattccgaactcctcggagccggagccgcggcgcaacatcactgatccaagcgtgtttcgtgccccctatcccacttcgcaatctggttgggctgactcggctttggaaagacggtctcaggttggtccccgatcggtgtcgcaggactacagcgttggcttgggacctcgggccggtgcacgtcaaatgacctcggatgcggtcgccctgtcggcctggcagcaggcatctcgtcctggtggtcgacctcatggttcccttcgtcgccgtccgaagggattttcgatttcatgttccgatccggcttccaccgtcattggctccgatgacactcaggtgtttacatcgtgcgatggatatgagacggactttatttcagactattgggactctgtccgcacacgtgaaaccaatcgcagtggactgaagggactgcggattgagacgatgtttgacaaggcaggtacaagcttggtgaatgaagaagccacgaccttggagtctctcctcccgcggggctccttcgccgctcggtcttcggacaaggatccccaattattcactgatccgcttctgtcgtcccctcctttggttcaaacatccatggttgaaactccgttcgtggctgacgatgatgctttcagcatgattggagcgcttccgagcaatgatcgtgattgtttttcatcttctctgacctattcattggcgaaattagcagagcagcccgactcgggcactggtgcagctaaggatatgtctgaatcggtgggtgacttggagtcggatgtcaacaagaaaacaaacatctttgactggtcggaacacgcgcaccatacccgcgaaacttcagactctgaggcgcgtcctaagactatgcagggaaaacaagagggggttgttgataggagccgggctgtttgccggaaagcaccatccactgtccaccttaggagccagagtgtccctgtcgccagtgaacttcccatcaacgaatcacgtcaaacttctggcaagtttggtacttggggattgggaactaaaggtgtgagtgaagattgggacagcgattttgatttcgacgaggcggaggacacaccagtcgccgaagacaaaccacttgttgagcccgatatcaatcgccagagcatgactgttcccaaggccattctggagcgtcaagcaagtcttcgtggtcaatttgggcaggttcaggaattaaccatgctggtggaggaattgaaacgtcttcggcatcaggcaaatgtcctccgaattgtcaacggacctgccagtgaattgtgggcagaagcagagcagatcgtgaaccttgctaccattgatgatgatgaagctcgtcgctcgccaccagggtctcctcaatcccttactttcagttttgatgaatctgacgatgatggccttaatgggtcgtccaagcggaacagcgaagtctcctgggacgtgcccagtggtgaaaacaaagccatcttgcccctcgctcagctcgtaaaggactcccaaaagtccaaatctgttcttgatatcctccagcctcgtggtcaggagcccgctttaggtcttgacgggtcagaattggcatcacgcggaaagaaacttccgtttgatacttcctcgttgaagaatttggtggttcgtgcgggtgtggtgacgcgggcgttgaaggaagttattcgcaaagccgacggggtggcagacagccctcaggacttccaagacccgccattccgacgcattttcgacaaaccatcccacgatgatattgccagctttgaggcagcgctggctgacatgtcctaatcaacttttcttatcttttccccaccacatctcaatactcactccctctcatcatcttctatccgccaaccacaaccatgagacgaaccgaaaaacacctcaagatcatttggatgaccatcttctccatccctacctaatgtttacacctgcatgatctcggagaattccgtccatttctttcacagtgcgatctgactcaaaacgccattaccctttttccattctcgtgtacaactcttccccaatgtacattgccaagaatccggttttccctttcccaccctttcatgtgtgcatgccacatacgagtgcccattgggcccatgaccattctctcttgcgtcatcttccccttcctttcgtccatgttccatatttgcgcagctcatatttcctaattgcgctgtatcactcacggaggatcccttctacgggatgatcctggtgttttcgaacgaagatccccatatcaggcaagatgaaaagcgatgaacttcagacgcgatgattaacccggggacgagcccggaggacaaatctatgaactttcaatcctgtgcctaagcctaatacagaaatgaaacaaaccttctaatctcatggtccggattaagcaatcctgaagtaaatctacaagagaccaccgtcctggacagtatagaggagtggtgtctaaccccaagaagctttcgggcagctattgatactcggtgccagtcgctttgaaatgtggtttgggaaatatatactgatgtccagataagtcgagggttgcttccttagacaattggactctccacgagtcatcttcaatttctacagtatatattgaactttgaataaataaggaacaggtatatcttccagttacttatcaataaggtccgaagccagatattgatgtgcaagaacagacgaatcctcgctctgctcaacggttggagctgatatatagatacaagtataaaattatgataagatttcagtctagaacgcagcggccatcatttctctacagtatataaattaagtatccgactagctccgaagttatttagctctatctgatgagttcaatagaggcgttttgtggctgtacaagccctgcgcatcacctgggcggacaagataaacaccattagagtaagacgtagtatagttaatccgagtattatccggggcactaggaaatgaaggggccacaccggtgttccatgttgaggagatcagattcggcttgtattgatctattggtgatcaattgaggtcttggatgtatggagtatgtacacattaagcattagccaatgtcgatgtccttggcatagcctcataggaacatatggagtatagaaagaaaagaagaaaaagaaaaaacggaaaagagaaaacccctgccttacatgagcgatacacgtcaatacgcctggacggcggtaataaaacccaaatacagccactcgtacgttacccaccaggccactttccggttcaggggcagcccgtcgctgattggctgacgagatagcgggttcctctatcttgagctgcgctactcgcctggtccccccaaggcgtgtcttaccctcaccttgcttggtgcagtcggcctcgcatgggggagtatcaacaaatagatgaaaaaggcgaatgatgaacagagcagaataaacacagatccaaaccgagacaaaaacaatggccaaaaaacagggtgttctaaattaagactcaggggcgagatgcggagatgaagtacctgtacaatacaacaagtctcctgtataatattggccgctagtccgctattctagaactcaactcttctctccttctcctcttctctttctctctttatccgacattcattcccttttggctgctggccgccgctcttttcgaggaccccccgtcctacacactctttttttacattgaccttatattgcttgtgacactcttttttaccagctattccgtgattttgcaattgtgtggcccccattttaaatgacgagcattaatctcgaccggctatcgcctttttaaacgtgttgaccggtcctcacgttcccaagtcgggtctattcctatagaccagactacaccaaccatgtctcatgccggccacgcccgcctggcgatgcggaatcacgttcgtcgggatgtcatcccttcacatcgattgccattcctggtccccactacctcctcgatacctaccaagctttcatccatcgtggctagatccgaatcagctgagccgacttcaggagtaaagcctaccagcgacctgaccacgacggtcttgccggttgtgctcggtgctggtatccctattttgtgcgctattattatcctcattgtgctgcaccggagacatgtcaagaaacttatgcgggaagatgcaatggataaacataaatctctcgattttggaatggatacagtggggcctgccaccagcaggaaaggaatgccccagatgtcagaacccactcataccaaaggattgtctcttgatgtcggtccatatctgttgcctccgggcctggaaggttccccggattcgctacgctccttgtcaatagacgatgacaagtaccgtccggctactgcttctattcggtcgtaccccagaaactcccgattcgagggttctgatgacggcaattcaggtcttctccaaaatgcacagaggatgtctcgttcatccccgccgctgtatccccccagttccccgaacccgcgcaatgaccgcctggggcaagtccccggagtgacacgtccgcctgctgcacagcaacccggcatggccaagggaagtcccaatgccagccggattcccacgccagatcccctgccccatctggatgcctcctcgggtctagactttggactgggcgatacatacggcaattcctatagcgctccgcatgaagatcgcccgaacttcccgctgcccgattcttcgcaaccacgagcattgacccatgatcagggtcttgcaccacagcttcctcgtatttccctgccggccagtgatgttagtgactatggtgatgacaagtcgcaatacaatgttccttcggtcaacattcatggcgcagaagatgtcacgcatagtgccccaagccacgataaccaacatccagaacttccagaggaccctcctaatctggatacgccatatgatagacaccgcgatacccgccggatgactctcggtttgcgcccgttgcccccagaggacccctccgacaacccagaacagcgtgccaatcggattcgttcgttctacaaggagtacttcgatgagagcaagggtccggaggccacatactctgaggacttcgggccggagttctacgaggatggtaatcatggggctggcttcatatacgacccaaccactggcgactactacgatgccgctcatgccgctccattcgctgagccgatcacccgtcgcgcgatgacaccaccgcctcgagcacctccccgcttccaaggagccgccgctcggcaccaggccaccaactctgcgggccaaaatggcatgcccagcccacgcgccttctcgtctgcctctggccgtatgcccccacgcggtcccaagaaagcaattccccctccctcaccgctacacatccttcctactcctcacatgttgacggacgactccctcttgactgccatggaattcgcgccggccaatggaatcaaagaacgccgcgcgggtcgccctgagacccccagcggtggcttacgcccgtaccagcccggcccgcgtgcgcacaccccactggcctctgcgttcgacgagctcatcgtgatgcccagcccgcacgccctgcgcaagtccggtacgttcaccaatctggactttgtgcccccgcctcgcttcaagaacgagagtggtaccggcagcgatgccggtagtatccgcagtgctcggtctgcagtctctgctaccctccagcaaaatatccgcgcgggcacgtaccgtgtcagtcgtctgcctgcggaagccgtcggcaccaaggatgacatgatggccagtctgcgtccgaagtgggacatgaacaacgcataaggaagcggcggtaccgctttccactgtgatgactttgttgtcttggtataagagcacgtgatgatttgatttgatttttttttgttcatctgggtcccccggtgcttgagcttttgggggggtgatggagcgcccctttttatattcattactccattctcctttttttgtctggacatctactatcaatggcgtaaatagacgatggttggattctgatcaatttgaaatttctttcttcggtctggggtgtatatatgtgtatagttctagaacattaatgtgctcagatctggagtataacatacaacatacgaatccgcttcgattcgtccgagggcactgtgtccacaattatgcgtccgactacgtacaacgggaagtcgcgcgagttggcagaaatcgggccgagcgctaatccaccaagtcaggggctagatgggagagatcacagcattttatttacggggcctaatagaatcgtatttaacgggctagccacagaaaacaagattatccacgccgatcgtcttttttctttttcccttctcgtcctagtagacagaagatgtgtacaatatagttacatgtcagtatagtattgttcaacaccgttgaagaagtggagataatcagagtcagtggcaactgagtacattgtgcatcatgactcttttatacaacataccacacacgccctcagtggaagattcttccgtccccataaccttgggattcggtccttgcttcagggcttatacccacgggtacgctcatctcggttggaggtttcggtaccgaagaatcaatacgtccacggctggtagtaaatattggcaaataggtattattctgggatttctgttgtgaatattagaggcatgaaaggtgttagaggtataatagagtctcacagagtacacacagtaccacggaggattattctatagcaccagagactccatatggtcaggggctcacatggccgcatcaagggattgccagaaacagcatcgtgtttgggatgtaactgcaactcgactgtagcataaccagatttaacgatcatgctgtttctacttcgattcagcagagcacaagtatctattaatacaactaggaatgcggatacgccgcaatcgtaagaaatctaacaaatctccacttcccacttcaatctcactctcccacaccacttttctcctcccatggctgctagattcggcctcgagagactgtgagtattcgttcttctctcttttccatccttcatcttcattttcctttctcttcttttttttctattcccgtccgttcgtgagatatcgtcggttttcccctgaagactccgaccatagcctcaagtctctccttacgcgttcaaatcgcagtctctcattaaaccagtctattaactcggattcaattcgtgatccctcagtcacattcagtccgaaattctttccgcacccggaagtgtccacaatctctcaaaactcgccgaacggtctcccggctcaggatcgcttcgatctttaccaccgccaactcaatctcaccgttgattatcattgaccagtattgctattgagatggcgacttcagtatccaagggcgctgccgctgtcgctacagccatcggttctaccgccgcggacaccgctgtacagacttcggcggctgctgagacaaccagtgagacatctgccgctcaacccacgacctcttcagccgatccgacgacttcggctgtcgaaacgacaacttcgtccacggctgctcccaccacttcgactgaacccaccactagtactacgagcagtactacgagcacgactagtagcacgtccacgccggagccgactacgtcgactcccgagcctaccacgtcgaccactacgtcgaccccggatcccaccacgtcgaccacccagcctgtgactacttcgtccacttcgactacttcttccacttcttctaccacaaccgccccgaccacctccatagctcccgagacgacaacgttctcatccacacagggaactaccgtagttattatcacgtccactcaattagcgcccaccgccgataccacgtctatcacctcttccagcgcaaccgactcggccgcgctctctacctccaccgcagcagctagctccggtggtctttctcccagcggcacaatcgctgtcgcagtcgtggtcccggttgtctcggtggcattgatcatcctggccctactcttcttctggcgtaagcgtaaggcgaacaaggcggccgaggaggagcgccgcaaggaagtagaggagtacggattcaaccccaacaacccgaacaacgacccaacccttcccggtatggcaggcacggtggtgcccaaggacaacgaatcctccggctaccgcggctggggaactacttctgccgggcgcaaggcgtccaccaacctctccagtggaatgggtggcctggccatgtcggaaggcagcagcccgggctaccaccacggcgcaacacctagcgatggcactgtgcaatattccgatggaacccggcccgactctggagagatcgtcgaacctctcggtgtgctaggcgccgccccagtggctgccaacaaccggaataatggcgatatccaccgcggcccctccaacgcatcttccgcgtactccgcagccaaccgatccgacgcatcggaagaaagtcacatgtccgctgtccacccctcagctggctactacggtgagaacccgtactacggcgacatcaacacgcacggggcatacggcggggacgactaccagcctgtgatccgtgacgtccaagcacgccgcaatacccgcattgaaaacccgggcgtctatccacgacagggcaatgccggtatcgcgcagaacttctgatggctcgactgattcggatttcctatactctttgatctccaaaaagctcggcattccatttggcattccattttttgtgtgcttgttttgatttttgatttttttttaaccttgcacaataccacacgctctttctctctcacccaccgccgacttcattcgttttatcgggtctctcatgttccaattcccggcgcgatggaccttcacttcatgtcactattgtccctctacacttttattttcttttcccctctttctgtcccccttaatcggcctgtcgggctttgatttggtttggtcatttgtttgatatatcccgcgcatctggtctcagctgcatagcttgttttttcgttttctgttaacacccggttttatgtctgtgttgatttgttgttttattgtggagctgcatcttgtacatttcctgctgcgtgtggagttttccatgcacctggacatactcgagatttgcaatgataccttgggtatcctggatttagtcccagttcccttgtctgaaatgaacggtttaccatgagttctggtatagttactcggagagtgccggcagaatcgtaaaagaacagcgaataatcagctaacttttactaaatacaccctaaacagcccaaccgagtcaaatggactctaattatggctaattagagtagtcattactaaaaattatgcatataataaacgtactcggtccccttccgttgcagtggtcaccagtaggttcacaacgtgcctccgctgttcgcggtgattggcgctggatgattcacacagctctccactccccggcttaattgcacctcgcagcttttcccttctctcgcgagactcgaactatagagaatctcctaacacgttctcgtccctgggccctgtacttgtccgtcggtctgccccgctatctctctatcgccctctatctctattaccgcttctaccttagaccctctgcgctccctcaatccttagcatctaatcccagttccttcatcatatatgggcgaaaacccatcgcaacgcaacgtcacacattttatcgacttgtgtcactctcttacctgtcccactattatttccttccccactgtgataacccattaactgcccctcttgcctccgaagccgaaccagctttggttcgtgtccttgtcctcccaccctcttttacttttttttcccttccccaatcccaatcccaattgtttcctttcctttgcattctactctacctcgcatagtcaaccagctccgattcttatagctctcggctccgtttcgctgagcttgcgctacggttgcgatctcggtctccagagctcgggagagctaaagctctctccgagagtgtgcacacaacatgtacgtatgcctggcagctcctgttgccggttgaaacattcctcgagctactgctgatacgccttgattgcataggaagttcggcaagcagatccagcgcaggcagctagatcttcctgaatatgccgccagctttgttaactacaaggcgctgaagaaggttggttgaacgtcctgtctgcttgcgggaatatggatctgagcaggactaattcctatacagttgatcaagcaactcagtgctaccccgactatcccggcacagagaacagccgaggagattgctagagctaatgccgacccccaaggcgcgttgcgcgcgaataaggaggttttcttcttccgtttggtaggtttgggatactttcctgtatggatggtatgtacttactatgatgtaggaacgagagattgagaaggtcaacactttctacctccagaaagaatcagaggtatggccatttattatatatccagtgcacagtcacccccctccggaggctcatccgatcccttttagttttccctgcgcctacggacgttggtcgacaagaagcgggtcactcaatcccgggcgatctcgaattctaaagctccgtcgaatttcgcggctatgtttgaaggcttccagcaattcgatggcgacctgaataaactgcagcagttcgttgagatcaacgagacggccatgtctaaaatcctcaagaagtgggacaaaacctccaagtctcgtatgaaggagctgtatctacatcgggctgtggaagtgcaaccatgcttcaatcgggaagttcttcgagacctcgctgacagagctactaccgcgcgactggaattggaggcttgggccgagggcgagaacattcaatatgacgcatcacgtccattggaccgtaccgcacccttaggctctgaagaggatgaaatggacaaccaggtcttgcagtctgcctccgctggaaatctgcaaaacctacgtgaatggctggccaggttacagcagttgccggacgcccgtgagcgcgcaacccgtacgttcctgaccgccatcaacgggttctcggatgatgtgctcgctctgctactggagagtcaactggttgacatacacgccgaggacgacatcaacgaacgaaactgccttcacgaagccgccatctcgggccgattatttgtcttccacgccggtctccgcgcaggcgttgatttcgcccgcgccgatgtctatggtcgaatccctctccactacgcatgcatgcacggccgcgtggatatggtgcgacatcttctcgcagccggtccgcaaaccgtcgacattatggaccatgacaacttcacccctctaatccacagcattgtaaagggccagctggaatgcgccgagcaggttctgcttagcaatgcccgcgtcgacccggagcccgagtcgcctcttctgaccggaatggataatcgtcctttgaagggtccggatcatattcctttgaatctcgcctgccaacacggctctctgcctatcgcgaagatgcttcttgagcgaaatgcgcagttgctgccggatgcagagggtctctacccgcagcatatggttgcacgtgcctcacaatcgccagacctactactactgctaaaggagcacggtgctgatctcgaccagaaagacaagctttatcagtggactccgctgttccacgcagctagcgaaggctgcgtcccctgcctacgtaccctcctcgagtgcggggttgatgcccaggttgtagatgaaaagggcctctcgtctatgtactatgctgcctgggaaggacatctagagtgcatgctccttctctgggcccagccctccaagaaaaaacccgcgctgggacctcttgatattctcaatggcgtgcggatgcatgaacctggtctgggcgacccgctgtctgtgactgcgagcgtctctgaattggaaatgacagatggtatcccggaccttgaattgcctccccccattatccctctccgccgctatggtcacaacttcctcgacaagaaagtatttgtgcaacttctgttcgatcaaggaaatgtcgggtctgtcatctttgatcaggcgggccgtcatcctgccgctcgtatgaccatctcttccaagctgtcagatctcatccctcgtactatcatgctacccatccaggaagagacacgcacaatatcgttccacgtggataacctagacacctttgccgtggactttgagatcttccctaccttcggttcaaaggtgattgcaaagagtgtcgccctgccagacatcttccgcgccgagtcgtccagcactggctcatgctgtctgcctctattcgacccccggctgcgtacaatcggccagctgcgcttcaagttccaagtgatcaagccataccccggcgatcccctggagatcacccactttgctacatactggaaggccaccagtgctcttgattcagatcataatggactggtgactggttccagtttgtcgggagattacgtccagctcttcgtacaactgacccgggaccgcgtggcagtcctttacccgcaatttacaatcaaccaccatggaatcgacattgcaatctctcatttgacgtttgcccagttccagaccattggcggagagcgcggtttcaaccctagcgagatcctcgagttcttgaaagaatcagcgacggttgacatagcgcagacccatcgactcttggcgacgtcgttcttatcgttacgcgatgtcttgcgctacatccctattgacttgaatgtcaacatctccctcatttacccatccgccgcggaggagaagaagctcgacctgacttctttggcggacgtcaacagctttgccgatgctatcctgactgatgtcttcgaccacgcccgtgtggcccgtgaaaagaatcccgagttcatgcgttccgtggtattcacctcatacaacccgaacatttgcagtgctctcaactggaaacaacccaactgtgagtctcctaatacagtccaatttgtgtgatactaactctgtgactagatcccgtccttctctgcaacgatctcggtcaaatccgggacctggctgggaacgtcaactcgatgccccttgtcaacagcagtggacgagcttcgatgtcgattaaggagtctgctcgtattgcccagagcaacaacttcatgggcctgatttgcagatcaagccttctggtatgtttgtcctatttcccgcctcttttttctctgctgaccaattagaatgtcgtccccgcgctcgtcgagactatcaaggagcttggcctcgtgcttgtggccgatacctctgatgaggtcacttcgaatcgattcgaagaactacccgctcctgatactatgggcgttgccgaatgggcttaccgcatgcccgacggtgttaacggtgtgatgagaggcaacggcattctgagatttaacgatatgatcgatatgtgatccgatttacctctacgcaccttttacatacgatacgtcgaaatttaatttctcaacgaagattacgagctttagtagccgccagaattgcttttttttttcctatcttactcttggctatttatttcacagcagagatggtcccgcgcgtgcgaccttctctttattgcgttctaggcttgttcatttcctagtcatcttgggcgctggagatagggctggcgtttttatctgggtttggctttgtcgactacatgtagtgagatcgtctagagagcaagagcaagagcatttgagagttttgaaggcaaagaaagactgccgtattagagagctgaatggctaataatgtacaatggaccgaatcccaggccctagtatctcccgctatgctacttacttactgtataatcaatcacatccccttcacttcacttcacgtactcttaggctttctcttcccaatatcccatccccacctccgcagcgtcttcacaaccttgggcgtgacagccgccgtcaaaggcacgcgaatgaagataaagctcttgtgaatcgcataagcgaaaaccaactgcgtccagatacctgcgtgaacacaaaccaatcagtcagaacatcactctcatcactcaaacctcaaagccctaaaccaaaacagaaacaaacttactagcttcctcctgattccgctcctcagcctgagcaagctgtccctgcccatcctcctcctccgaccccttcgtcttcggaaacacactcttaactttatccttcacatacccaataacaacatgctcatagtacccaatacgatcaacaccaagcaaccgcacagccgcaaaacaaaatgggaaatccagcgccgacaggccaagatacacgcccagcgcagcccatccgtactcgcgcgagagagacttcagacgctgggatagtgaaggtttcggtttagttttgccgccgcctctggacccagttccatttccaggtccagagtcagatccagagctagagttcttgccatcaccagcagacccggagttgaatcggcgctgcttgggcttgggctggaatgagctcggtgtcggtgtcgggcgggtgcgcgtcgagaagcgcgctgttacttgtgctccgtgcgcgtgcgggaagatcgtgctccggcgtgcgagggatggacgaattgaggggttgaggtggagctggagatgtgaagctaagcttggggatgatttgagcatcgagctagggcgcgagatccattttgcgaggagggttgggcggacggacatggtcggatgggttttggtagccccgttggttttggtgagggtgttgtgtgattccgggagcgaattggggttgagaatggagcggtcatggaatgctggatgggagggtttttttgtgtttctcggcgttttcggcttccggtccgatcgggcttgcggctctgtatgccggagttagggattaaggcggtttggtggttgtagataggatgggatattgtagatgggtgttaggatttctatcgacttttttctttttgttaaaagaccttggtattagctaactatgtcttaacgcgtggggagattgccagcttggatttgtatacttcagggcggcgtgcatatcgctgactaagcccaacaccaaaaacttcccgagtttctcagccacgacgagcacctcaatactcaaacccctcccaatatcaaacccaccatgtcgccgcgcttaggagggctacttcagctctcgcccgtatggacgagctcattgatcacgccccggatccccatgcggtcattcggaatccgatctctcaacccgcccaagcccagtcggttcaacatcgggcccggactaccagtcctcgagtcgacgtcgacagcggctctcctccgcaaggcctattccctgcccctccgcaccggcgccatcggcatcaagaagggcatgacggccatctacgatccggagtctggaaagcgcatcccctgcactgtcctgcagctggatcgtgtggaggtgctctcccacaagacccgcgagcgacacgggtactatgcggtgcaggtcggtgccggctggaagcacccgaataacgtgaccaaggctatgctgggtcatttctcggttaatgggctctcgccgaagcgccatatctttgagttccgcgtcaaggacgaggcaggccttctccctgttgggcagagtattgaggctggttggttccaggagggccagtttgtggatgctcgctctaataccaagggtaagggctttgcgggtgtcatgaagagacatgggttccatggtcaggatcgcagtcacggtgttagtttgacgcatcgttcgatgggttcttcgggtcctggtcagggcggtggttcccgtgtttaccccggaaagaagatggctggaaacatgggaaataatcagaacactgtgcagaacttgaagattctcaaggtggattctgagaatggtatcgtggttgtcagcggtatgtgattagagatgctctgacctctcgaagtcaattttgctaacttatatttttcaggcgccgtcagtggtcctaagggctgtgttgtgagaatccaggatgccgtcaagaagccatggccggaagtgccacaggcaaagtcggctgaacctgccacggaacctgctactgcttaattggagatttttcttagttctgaccatgtactattacaccatacgcgcgatattgtttgacttgagcggcgtttgtatatgatacaaaaatgatatcctttcttttttctcttagccattgagaaaaaaccagtggcttcgccaagttgataacgcaacaaatggtcccataaagaatgaccctaaacgcccgagccaatgcactgctgtatctgtacactctctccccgatattcgccccgatcttcagttcttccggaagggatcgctatcactgtcaagcaattgaaccacctttccatcctcagtctccagactccattcctcagtacggaactagaagagaaaacaaaacaaatcagcacttatcacaaccataaaaaaaataaatcaaaaactcacatagctcatacgatccggccgaatgcttcggaacctcatcttgccctgggacttagtccccttaacccaaaacgagatattaatgcgcccatgcaattgattcatctcgccactaatccacggaatctgctgcgcaaagtagatctcgtcgccgaggatctcacgagcccgcggcgacgtccgcagcgcatacagcgtgctgttcacgatgctcgacgacgacttctggtaattgaagatgcccagcatgcccgctccagtcgtaaggatgaagatcgggagtgtatacagccacttccggccaggcttcgggttcgggagctcgcggtctgcacggcgttctagcagtgggccggcgttcgggcctggcgcggcgatcattgtgcggcggctggctggcttggggcgggcggtttgccgggcgagcgcggcgcgccgcgtgaatgctcgggagaagaacattgtggtgttttggagggtttgtttggttgttttgtcgggctggttggggttggggggtggagaggttgcggaagaaaatagtgttcaaacaagacaaacagatcgggcggtttcgacgtcactgcaccgccaacggatgagattacaacgctgctttgagatttagagaaatggctgcggtgagattgcgcaaggcgtttcggtaccctgaggaatcggagggcgaacgagaggagttggatgaagaggaacaggaacgcgtcatcgagcagctgcagagccagaatgatgctcggaatgcccagtacagtgtacatatctttctttcttctatattcgagaatccacgctgaacatgtttccaggtgatcttcactgcacttccactgctggctgcgacagtatttgtgccttcggtgctgtcagcttccagtcaggctgaacgattgttctcgctcctcggtctagtctcgttgttgacaacggcgtatatcatgaaacgctctcctctccagcctgatcgcaaaggcaagaaacctatgacattccacaccgaacgtattgctcggatccatgggactctggtacctggcaatagtgcgctttgcttgttgctggctttggtctctctttctacaggatcatcttatgcgatccgaccagtactgtacttgattcctggaggtaagtctgctctttcttcgctggggtatctactctgaccttgtacagccatgctcgtagtgattctactcgctcgaaaggtcatgctctctgttgaccttgcatccctcaaggatctacagtacgagtataaaggtgcctagccagaaattcaatccaacttgaatacatatatgttcactattagtacagccagattttttttaaaccatgttgtcgcagaagagataaacccttcggggaatcacaaataatacatccgatttccttaatcaaacaccattttgcaaatattcagtgttcatatcccacttttaatccttctgtatcatcttgcgcatgtaatctctgttgtatgctcaaatccggaaaatacagcaacgttcatggccgtttcaagtgcttacggtctcaacagagtcctggatcaccaacgatgggtcaacggggattcccccgtagtcctcataaaggaccagtagattctcatcgtcctcgttctcatcgtttccgtccccattcggtaccggctggtcgaatgggctggactcgaagctgaagccctggtcctcgagggtcttatgtcgttccagttcggcttcctcagcttccttctggcgtttttggatgcgtccatgaacatcatcaccaaatttcttcaaccaccaaagattcgatttccggaaatccaccaaggtctcgatactgcggggatcggcaaccttactagtgtcatggcccagaatggtacagttaggctcatacggtttcatcgaagggtcacgctggcaagcagcgcaactgcattctttacgacattttggacagagccagtgatgtttttccatcgcctcctgtggggagatttcaaacgcgcggaacaaactgccgtaacagtaacgctggtcacagtttgagcatggagcgagtttccagctaacttcaaaatgaagacaaacgtgacagcggccgacgtcatttgattttgccaggagagactgccgcaatttgcggcgctttttagatcgattttcgtcttcactatcagcgtcttttgtgatttttgccacggggttgggctttttagggtcattccaagggcggcgcaccagttgctcctggcagatctccgccacagactttttgcctgcctgacctcgggcgacaaggaaagtgggaaactgaaccttgaaatccttgttgttctcatcagaggaaaatatcaaccgtcgccatgtttcataacgctcggtcaagtgcttccatgtaaattgttccatccactgaaggttcgaaacacagccacagcttctacccataacgtagcaatccatgcagacatcataaggatcttcttcgccgccgagagcgtaggcacagccagaacaggtaagaaacctgttaaatatattgcaccggcagaatgagcaggtgacattgctttgaaactcgtggtactcgacattcttctctgggtttttttgtgagaatgactcagacaacaaaatattcttgtacatgctgaatagccgcttaaagtcgtcccacagttgaatcaccaccgggtggtcgatattttttgcctgccgcaacagtttggaatatcgttcgagagtgaagtaaacaatggctttattcttatattgctcatcgcggcagaccatccgcgcatgcggtaaagcttcacgcagagccagctcgagggtgtcaacgatagtgcgattccaggcaactttcattgtccgagtgccacggttccaaacctggtgtgcagcgagaggaggtacaagaataagatccccgggtttttgttccaccacccaggtcttgaatggtgcaatcttccatgcatgcaaaggagcaaagaaatcctcgatgtcaatatcgtgccctagaacagacatccagtattcggaaacaatccgccgatctttggtctctgtcatgagccatattgaagaacccggttccgttggcttgccgtattctggagacccgtcggacgcgtcgaccattatattgtgaccgagactggcacacatctcctggtgtgctggtgtgtaagtaccctcatggccaatgtagcacatcaggttctccgcacgcatgtttgggggcagactgctcatcaaatcgcccgctggggcgatgaggtcgccttggggggtcctagggatttcagccagattcgtctttcccgacgcagggccttcaaaggctttgggtgcttcgttgaggtaaaacaatgaaggaggtaacagtttctcaaggtaagcgtgccactcaggagggcagtcgatgtccttgaggtagagccgttggactactttgtctgcgtagttgtggacagttatctgccgcgtgagaagtggtaggttttcaaggtaatggcccatactgaagttctgggtcctcttttttaccagatctcgaacctcctcaactaagagaggttgcagttagaatcaaccaacgaaggttgagaagactcaagagcgtgagcttacctttcttcgcatatttttctcggagccatttttctgagaaaatctgcttatcaagatgtttatcaaatcctctgatgaccagtggttttccgctcaggacaacttggaacaggacaagcttctcaaagtctgcgagcggaaattcatcgatagagtcacaggtaatattcatcgcaaactcgaaattaggggtagattcaacaacctcacgaatgtcgagaagaggcgataggggctcgaaagccaggcgggttcgatgtgccggcatggcgagcgcaaagccccagagggggcaagatatcgacgtctagttgatgtttgtaatcggcgcgaggctcacagggaccgcttcatgatttgagggggggggggggtattggtagtcacagccgatatataggctggacaagtcttgtaatcattaaatcgttggctgaattgcgctggtctgtgttgtttctgttgtttctgttgtgcggcgtgatgatggtacgagataagagcggagtaggaaggagcagaggggcagtggttgggtatacactagctagaacagaagagtatagtatgtcaatttaagattggaagccgggaggtataaaatcagacagggtatgaaagaaagtcatgtcgttcgttccctttggttcgggtgatcaccgacttctgttggaacgcgggatgccgcgattgatggcctcaggcagagacttacacgtgaaaccttccaatgttggaagtgtcacagttatttcactattttatctatatatttccaatggaacttagctgacatagcatattatctttgcttggcttaaaggttataaaatttaacgcgttatatactcagcagtcagcatattgtgacagcgcaactccatagatctgatgccccaaataggcttaggcggagggaagccgcttctgctgcatgccgatctaatttccgacttctccagatctttgaatggccagaccttcagggcttttgggaggtatataaatattgccaattgcctgattgactcacccatgtttggtctctagatcccctaccctcgctatgctttccaccagctcccggctcttccgcgctcgactatccccatgcaggcaaaaggtcaacctcagtctgtacaatgggcgcctttccacactcgctcacaatgcccgttcttcaactcaattgaatggcagccgatctctcgctggtgcctcatctaatgccttgcaaccaacacgagtccaagcccgacacagctcccagttgcaatcgcctgcaacacaagcaatcgagacggatagtgcggagaagaacccagccactcactacaccccaccgaagacaggcctgattgcttccctgccgagttcatggataccgtatgcagaattggtgcggctggacaagcccacgggcacatactacctgttcttcccaactctcttttccacactcctcgctgcgccaatggctggtgtggcacctctccatgtcttgggcacgacggcactgttcttttccggtgcgctgatcatgcgcggtgcaggctgcgcgatcaacgacctgtgggatcgaaacctggaccctcacgtcacacgcaccaagttccgacctattgccagaggtgcactctcaccgaaaaaggcaatcctctttacaggctcacagttggtggctgggttgggcgtgcttctttcgttccctacacagtgcctgtggtatgggattcctagcttgccgatcgtggtggcctaccctcttgctaagcgcgtgaccaactacccacaagctgtgcttggtcttgccttttcatggggagctataatgggattcccagcgttgggggtagacctgcttgccaatcatgatgccttgatggctgcaggtgctctttattccagttgtatggcttggacggttttgtacgatatgatttatgcgcacatggacattaaagacgacgtcaaggctgggatcaagtcaattgccctccgccatgagcacaacaccaaggctgtcctgagtggtctggcggtgactcaggtctcactcctcgcggctgcaggagttgccgccggttgcggacctgttttcttcgtcggcagctgcggcagcgccgttgcgtcgcttggtctcatgatctggagggttcagttgaagagtgtcccgaactgctggtggtggttcaagaacggatgtctgctgaccggtggaggaatatccttgggcttgctcgccgagtacgcgacgcagtaccttggtttgtacaatacgacggagccggagcgcgtgatggccgagtcaacgcaataagcatgtaacaatatgtatatatagacatccagggcttggttccctttttcacgagttctgcaccaatcctgcgtagttttggatgacagtgacaatatctctccagtccatcatatttccggtactgacatctaggctgttctccgcgggaggcagcaaagtcacccagccttccgggtttgattcactccatccccactgatcacgtaggactttaaactgtttttcagtcactggatgtcggtacatacatctgtccatatccaaggctgcaaagatcctaggtttctggcttttgaatcccatatccactactccagtcgtgtcccaggccctaatgaccgaaagaagcaagttgtcggcgatcccattggccattttcgccatggtatttgcagacattggggcgaccagtagaatatgcgcccctattatgatgtcagttcatcgtggtatcacgtatcattcatctacatagccactgacatttgcgcagctcaatatgcagcactggtcctccgcgtgtccacgacggagaccattcatcttcgtcccggtagatagcgtccacaccatctatttgaagcagagtttcgaaagccggctgctccaagatttgtccgacgaggaacttctccgctggctcggtgactaggatacggattgagaagttcttattacgacatagcgcctctgcaatgtcaggcagcttgatagtagcggctgccagtagcacatggatcttcttgtcatttgcatactgctgggcgataaaaggcgtcggggatgttcgagaatccattgtagtagctttaattagaagggcagaaaagagagaatgactggtccatagagccctagagagctttagatgtgtgggggtcggcggaccaaccgcggattaaataatactaaacctttccccgaggcaacttgacgaacctcttctcttgtaaaccaccatcattatcaaaatgttttccagagcagttgcatcggtatgaactgttctttattctcgacatccgccattcgcatcccccagctaacatgaatctcgcaggctttccgcccggtctcgcggccaacctttttgcggcccgtccgctccgccatccgattcccctcgggccctgccattccctccgtcctccatgcacgccttctgtccaacgagacccggacggcgatcgataaggcggtctcttccgcccccgtcgtgctgtttatgaagggtacacccgagactccgcagtgtggtttctcccgcgccaccattcaaatcctgggtctgcagggtgttgatcctaagaagtttgttgctttcaacgtgctggaggatgcagagctgcgctcaggtgtgttgggattaccccgaacttcctgccggctatagattgctaatcgtgctgcatttacaggtgtcaaggaatactctgagtggcccactattccccagctatacgtcgagaaggagttcatcggtggatgtgatatcctaatgtccatgcaccaaaatggtgagcttgctaaacttttggagaccaagggcgttctggttgcggcggatgaataaataacagccgggcccgagtggaagatgtcagcctatcaatttggtagatggctgtctttgtaaaattatttgtctctaatttattttggtcctaatatcctgctggtcagatagttgttttattgatttggcaaatggaaggtaatctccaatctgtctgctccagtagaccaattgtcacaagccgccatgcaaacgacgaggtggactcttgttcaagaagtaaccccagttgatggggtttaacatcatatgtagttgatcttcattacatgattagtatttctcttaaatcgacagccagcctaatgagctgcttgagctgcttcggctgcctcttgtgctttcaccaggtcttcggcaatggctttgtccagctttgcgcgttgcctggcttcgtaagcttcacggctcttcaggatccgaccaacaatttcgccagcgttcacgtgttggaaggcatgctgctcggcttcccggaagattcccatcttcttgggagcagtgtatggatcgtatgttagcgggatgaaggtcgtgggtccatggtagacagcatcgggagtgccccacgggatggccttcagatatggttcggtaggggtaaatggtgcagagaagatgacggcattgatgtactgtggcgagggttagcaaatcgaacagacgagaggaaattaagaaagacttacgcggcattgaagaacacataggccacgttcgaagatgttcatgattgggtagttcaagcctttccagtggttgatcacatcgtcatcgtggatacctgcgacaatgtaggacggtgcatagtcctctccgtagtccttcagtctcttttcaacttgatctggctcataccagccattttttcggccctcggactcctcgagctccgtgactttgcgcaggaacgcaatgtgaccggaggaaaaaaggtcgaaccctccgtcaacataaaccaccctctgcccaggtttgggtccctttccgtcgactaatttctcgaatacaccagcttcctgaacgacgtggtccatcttcgcggtgcctgagccagtccatgtccacacctgaggcccaggctgaagaccactctcgtccgttgcgtaatccttgattctctgcaaaagatctttggcggaagcctgacgctcttcgggacttccatatccttctagtccagcaagtgtacccttcacagatttgacaaagtggttcctggtgcacaacagcatgcggccaacaagatcggttgtcgagatgcctggggtacgtttgacgacacggaagcgcccagcggctttgacgaagcggtaacagtcatttccatcactgtcggaagtaatgtcgtctccgtgtacgacgtatttgcacccgtagtgggatacccagggtaggtaggtcacatagggggcatagggaacactctgagttgcccatcgacacgcgtcaacggctgcgacactaaataacaacgacattaggaccaggaatcaacaacagtaccagcatgagaccaaaccgaccgttcttccagtgacatcactgtcgggcccttgttctcgaggatagcttcatcggagtgtattcccacgtaaagggcctttcccagctggcgagcttggagcatagcaccggcatgacctgtacaacaatccatcaattagttcacagcaatttaccaggtgttaattgccaacctaccgtggtggctgaagtcgaagcatccatcgacccaaagtcggtcctccgagattggtacatcttcctgggggtcaacaggccattgtccaggcagaggaacctgctcctcgaggggtgttgagtccattttcacaacagtactccgtaacaatttcaaaattgttccaaagtctagactgtccaggaggtggggaggggggatcgacgataaattacatacaatatagggggtacggtcacagtaatcttccgcattgcggggaactttatgtttctccgagtctcctgagtcgcaatcaccttcaaacagaacatatcaggtcttgccatactccccgaacagtctattcggtgtcgtgctctcctgggctctcgtcctctctgacagctcagcttgtccagctatagacccctcatctgcgtcgcatcgtttatttcactccgaaattgacaacaccaatgattccctctacattcgccccgagcatcacgcggcgagacacaaccaaatccggcgttggacttgaaacggcatatggcatcccacctccagttatgagcggagggggctctcttggcccgcaaagtgcaggcgcaatctatcaacacatccatgaaatggcctcgaaacggatagcgactctcgactacctgagaaaggcgtaagtagatcgcagttcagccacacctgagctgtgctaattcataccgcggtgtctatagtcatgaaggacgagtctattggtttaatactgtgcatttctcccgggctgacatcgctcgtctgccatactttgaagcccggaaactgtctcgccgcgcaatcaattatttgcttctaggcttgtcattgcccacaatactcgatgttaacaccaccccgttcgagtatgtgcgtgccctgaatgctttattgctggaattcgaagcgttccagcaagtgcatcccccagaaggcagctcctcgtcaagtcttgcaagggcccgtataccacaaatgttcaagcgggcggcgcatggaggtaccaagacccgacgcgccagctcggcaaacgagatcggactcccaatgcagtccagtgacccatcagacttgaagaacacagcagggaatcttgggtcggctgcctctgcctcggtcacctcctttccactcacagagtcttcggatcttcaccctggcgaggaatacacttatcttcttacgccatcgttgccattcgagccagacttctttgagacgtttgcaacgctgtgtgatgtcttaattgacacttatagccggctatgtgctctagtagcatctccatctgtatgtacagtggccctgggcgagatattttccaaagcagatgcccggttacgaaagattatggtggccggcgcagtgcgtgagttcgaagacgcgagccgaaacagtgtcaagagtgaaattgccggggtcagtcgggtggtgcttggtggtttattgggatagcagcaaggttttgctgctgtataattgggtctggtgtcggtggtcagttttgactggacacatgtttgggtttcttatgagacatgaatttatcgagttgaatgttatatgataatagaatttcagatctaaatttgagagcttctagcttctaataatacatatgttccgccttcttcagtacaaaaagtaggatatgaaaaacactcactcaaaataacttaatgggactttttttggaaatgcggcttcgtgaggcaaaaggtggtattcatgggcagcttgaaaagagtcgagaattgaaaaaagagacaggttaagacgaaaaactccacttggcgccacatgctcgaatatgcaaaatagacaccgaaaatatgctgtcgcttgatgttgaatgctgaggagaaaaaacaagggatatgctgttggaaagaggtcgcggaagtatgtcaaacgtatgagacattcatgattgtaggcgctgcttttcaagttcgcgctgttcgccgaagacgcggcggctcatctcgaggacggtttcaaatccttcgcggccaatctttgcattttcccggaagcgatcaacgcttgcctcctcaaccttgttcttgatcttttgccatccaccgcagagagcggtgattttagcttcttggctaaattcggtcgtggtagccgggctaagcgaggattgccggtagataacggtctcgcggacgctgaggacgttcgaccacgtcagatttgtggagcacatggtcaccttcttcgcgaccggatcgacataagagacttcgtaaacgtgagaggtattcgttccaccgagaatcgagagaacccattgtggcacagactgatcgcacgtgataagacgttcggtccgtaactaagaggcaaaagtcagtaaaaaggttcgggatatttggagagttctttgaggttgaatgactcacaataccagtcgccggatcgacggttcgagagagcgtgtctacgccaacgacgtgtgtcgacttatcattccaaggacagtacttgcgccagttcgccgttgatacttcgtcccacgagtagtcgaacgtgcatccggaagagaagaccttcatattgccgagtcgcagttcacttgaacgatgccgttgggtcgcgtgatcttggaatatggtatttgggtgtaggacagccttgacaagcgctgtgatggatagaatcggatggtagtgttaataaatccgagtagatatagtaagaatgattcaagccgagtgtgagagataggatgtgcaggagttgcagaaagtgatttaagtctaagtctaggaattggaaggcaaatatgagcaagtcaaatagaagaaaatggagaagagtggattttaacgatcgaccggtctgaggggaaaatccttcttttttccctccgggtcagggccggtcaacgcggagcgccacacgcctcgccgccaccgggtttttccggttcctgcttatctaatcagcggcgcagccgcaccgggcagatatgcagctgagatgttccagaacgtccaattaactctattcaatacatattcgtcgattcgggtctttatatcttctccttttctatacatcatggtcgaactcaggaaacgcaaggcgccagccccactgcccgtcgcagagaagaagaccaaacaagcccctaagcccaaacaagaggcagctgttcccgataatgataccgaaaaaagccctgggccaaaactccctgaggtggatgatacaatcgacatagaaactttcggtggcgagtttgagaccaatgaggctgaaaaaacaactctgaagaagctcctcgaggagagcaagaccggcgtggttttctttacttaccccaaagcctcaacacctggctgtaagtccctgtgtcatacttagtgcttctcttgagagggcagagctgtgttcatgtcgtactttgtaatcatcttactccagcagactgcttacgccgcttcatctaggtaccaagcaagcttgcttgttccgtgacaactacacccacttgacttctactggtctttctatctacggtctttcaagtgattcccccaaggccaacaccacgttcaagacaagacaaaacctaccttatccactcttgtgtgaccccaaggcttctcttattgcagccattgggctcaagaaaaaccccaagggtaccatgcgaggtgtctttgccgtggataagaagggtaaggtcttgcttcgcgaggccggtggtccagatgcgactgtggacgctgtccagaggattgttgccaactggtctagcgtggaagataccaaggcaaacggtgaagataccaaggagaaaggtgaagataccaaggaggaaggtgaagacaccaaggagaaaggtgaaggtaccaaggaggaaggtgataaagcagagtgattcaactcgagtgatgtcgtcacaatcacacaaaaagcgacactaagataccagatattgcatgtatggcaccgtctatggtggtttatttgtctcggtgtacgtgtttggcgtagattattagggctgtcaggttgtttttgaattgctgtggattccaatctattcagtctgagatactggtacagcacacatgatttcttgcaacttcccctatccactgacgatgacacctccgttggggtgcaaacattgtccggaaatatagctgctgtcctggcttgcgaggaaaacgaagcacgttgcgacctcgctaggttgtcctggtcgaccaatcggcactgcatggaattgttccatggcctcggtttgcattgtcgcaggaatcaggggcgtccagacttgtcttattagcatttgacttggaatagatataggaaggacctacttggacccgggcagacacaattgacccgaatgcctttcttcacctgctggttcgacaaggcgcgggtaaatgcgacaattgctcctttgctggaggtgtaatccaggagatccgctcggccaatgtaaggattgacggatgcgcaattgatgatggtagctccccgcttcatatgcggaagaacatacttggaaagataatagaaggggtgaatattggtgtcaaaggtggtctgccactggtctctgatggttcattagtaggatgcaacagccgaagagcagtaatatggggcaactcactcagtgacctcgctgatatcgctcagcatgttttggaacccggcattgttcaccagaatgtcaatgccacccatcttttccagggcctcgttgatgatcttttgacagttttccttcttgcgaacgtcgatagcgagagtatagcacttctgtccacattcctcgactctcctctttgtctcttgcgcatccgactcctcagctggcaggtaaacgatgaagcttgaggcaccctccattgcaaataggattgcaactgcccggccaatgccggagtcaccgccggtgatgattgctctctttccttcgagctttccagcggccttgtaggtctggtaaccgccatcctcggtaggaagatgagcagacacaggcttaggatctcccatgtcagactgcagacccggccttgtcaagtgctgaataggaatcttgtgacctatatgaaacacagtgtcaggaatcaatacttcacataaatcacacgtactcacctggcgcaaattgggacttagccccactggcctctcgctcgatatactgggcaacaggcatattggaaggtttaggcaagaatatgaacaagagtaatagataacttatgtaaatttgtgaatagagtacacatctccatgcaggaaagcaccgtttaagtaaagaaaatgatatatggccaccaataactaaagccgggcatatcaatgtcactatgatggcctgcttacaccccgtttgctccaaattttgcctatactggggcgatatataacttagatgttatgatacaaccagagcatctctgttctagaccttttctgtggcggtggtttaatcgatcatgttaaactattcgatccttcagtcgtagccacaagtttcccatcccagggacgacctgtatgtccaatcgggcaaagtgtttaatacctaaatgacacttctctatcccattcttgatattcctgagctgctatgtttgtggtcgaggttaggcaggtgcgaatgacggagacttgccgtcattcctacctaccatgcttagttggtggcgctcttcacctagggagctcgataacaacaagccctactgtttcatataggaataacatagcatatttctcctttttgttcgtcgggagaaagcaaagaaagatcatgggagaatattgagttctatacatacacctataaatgcttgagcaggtatatgagttgtttcaagcggatttagcgcaagaattgacgtcctggtatgcccttcaaatattaattggttccactataaggaagccatagtaaatcagtatggagaatggtagcaggttttctattgtagttgtcctcatgttgtagtcgaaatatactggaaatccttatcttatcaaccagcaacatgattggctcgtgggcgtccgcccggcgataattttttctattgcgctttccgcttctcgagactcttggtgttctaagaaattgcctggctcttttcacaatggcgaaagggcaacccaaatccaagtccgtgtcggctaataccgccaaaatccctgagcagatggctctttcgtccgctctgtcctctccatgggggttcctccgtcctacaaacgatttacatacagccgtcgtggattctgcaaagcacatcctggactccctcgctggttctgtcgtggatgcccagacaactcgccggcaactcaataaaaagcgcaaaaggtcagacctcgaatcggattcagtcacacagctccaattgaagaacctctacgtggagggtttcacctcgaatcaaatatgggagcaagcaacacgaattctcgagtcgactggtgacgagatcgagcgcgatatcactttgattactcaacatagcggctacatggagtcggctgactccgagcagctcgaggatatctctgaccccgagggtgcgcaaagcgacagcgacagccacgagagcatgcttgaagatctctctgagggctcaggtgccgaagacgatctcgacgaagaatctggcgaagagcaagagatcgatatgggatctgacgatgacatggaagacattgaagatatggacgatgataactcctcagttggctccgccgaaggagagcccgaagtatttgtcgaggatcgatttggattaaacgacgggttcttctctatcgacgacttcaacaagcaatccgaggctttggagagacaggatgccgcaggaggacccgagcagaccgaggacagcgacgaggaggatctcgactggcattcgaatccgttgatggctggaaattctgcgaccatcagtaaatcgaaggattcgcgcccaacagaaaaagaagacgaaagcatggatgatagtgaggaggaagggccgactttcggtaatgccgatctcaacggcgactccgattctgatgatgaagacgtcgcggacatggacgacggtgaagccgctgcctgggtaaacaccagtgatatcaaatacgccgatttcttcgcacctccaccccgcaaagcctccaacaagaaacaccgcgccctcccaaaaactcaacccgacgcaccagaggtcgatgagagcgatgtcaaacgcgctattgacgacgttcgacgggacttgtttgacgatgccgatgcgggctccgacgaagaagaggacgatattgacggatcagcggaccctagtgccccacgctcaacacatgagaagcagagagcacggatcgcagatgaaatccgccgtctggaggcggcgaacgtggccaagaaagaatggatgtatactggtgaggccagagctgtcgagcgacccatcaattctctcattgaagaagaccttgactttgaacgaatcggaaaaccggttcccgtcaataccaatgagaccaccgaggatatcgaagaactaatcaagcgccgaattctcgccatggagttcgatgaagtcgtccgccgtcggccaggcgccgagggccagcaagccggaaggaaaccccgcttcgaactggatgatacgaagccacagcaaggtctggccgagatgtatgaaactgaccatcttcgcgctaatgatcccaactttgtggatactaaggaccgcaagttgatgcgggaacatgccgagatcaccagtctttggaacgaagtcagcgctcaattggatacgctatgcaactggcactataagcctaaggttgcccaagcaagcatcaacgtcgtgaccgatgcgccaacgattatgatggaggaggcacgcccaacggctggcagtgctgccggtggccctgttggacttgcaccgcaggagatctacacacctggcgataatggccgagttaagggagaggtggttcttaagactggcgcgcctatctccaaggaggagatgacccgtgagcagaaggccaagaacagacgccagaataagcaaacccaaaagaaggccgatgctgccaaacccactcaagaaaagcctggcaaggcagccgagaagcagcagatgatttcagacctcaagaagggaggagtcaaggtcattggcaaggacggccgtatgacgaatatcgagggtggctctgtccacgagggtgccaaaaacagaggcgacaatctgaaattgtgaggagtatatttaagggccagtatgtactattcaggagtcatatttcttctacataaaatctattttctagcattgcacatatcatcattttgtgtcacttttctggtcgatacgtttggcacgtatcgtgtagagaaatatgttctctctattatagctttcagcaccaggatcatcccggactggctccatgtcgaaagcccttttcgccatcttcatgaaccgcatgtcggcgcgtctacgacgcttgtaacaaaagtaacagaccgagtcaggtcccaggaggtgctgaagcgtagtgatcaagagcgggaaagccggctcaaaatagacacagtctgccgcgatgatgacatctggtttctcgggaatctggtttgggatcggttctccccagtttagtatcgcagctgtcgcatttgggccaagattgttaagttgaatgttggacttcattagggaaaacataggctcttggtctgtgatatagatcgggtgctcgagacgacacgcacgtgccacggcgagtccgacaagtccacctccagcgccgagttccacgctattcaagattggattaggacgaaacgagcgaagaagagtgaatggaaagaatgctcccggccggttgggcacacagcaaagcaaagcagcacccacattgttttatcggatagatcggtgatatggcggctgaggaggtatttggccaggaccattcctgcgggccatagttggccgccgcagccgtctttcaggtcttcttttagtagcaatggttctttgaggagtccgtcgaaggaaatgtctgtggtcactgcggctttgggttcgcggggaggggccagggattcgctgattttgagtccgtctgggcttgagggtgggctcagttctggaagacccagaagagttggtatgggtatttctatcattgtgagaaatttgtgaattgttgactgttgatcggagaaagttttagtgggggatctgtacggagtagcttatcgcgaattagacctagaaggatcacctgattggttgagtggcgatttggctattaatttagatcgaatataagaaattgatcagaagaatggaattgtatttttttgtttttgtgtgcaggtttatatcgtctatcatatgcattgtatatgcaccggatccagccaagacaagcttatgcccgtgcgaacgtcgatctatatcatatcgatacttatgttgtatgttcttattgacatgctaggacattgagggctaagtgacttctaagatataggaattgtgtatatcaatatatgcgcatatataaacaaaggtaccatagttatgaagcttgcgtggggactcttattggaacttggcgatccatgtgggttttattaatatctcgttaaccttgaaatatggatctacatctaccttccagaggacagtattgtgatacccctcataacgttgcatccatgctttgaacctactttagtcttataaaagctaagtctagcgcatgtgtaacggcagtatgaagtaaaattggacacatcgatgtcatatttgtgtaaatttacatgcattaactagttaagcgcaagcttgacaagtacatatgatcacagccactttgttacatggtctgtgatctcacaatctcgtatcatttactcgaacgggtgagtacgtgttccccaccaggtgaggaacaaactgagtccaacagtctcgaacaccctcgagaccgcaccgacagcgactgtatcaaggggtcgcttctcagagaagagctggctcacaatctgtatatatatgtcagatgaattgcttggggtttcaaggcaggatgaattgaaaacgtacgcctggagcggagcttgcgaagaaaataagggagccaaggtacgcagcacccttgtagctcagtgtgccggtggcattgatcagtgcagccacaccgtaggtctgcacagcacttccaacgagggagcttccccaggctgcagctgcgccggcagcttccttggacttgatgaattcctccttagagttggcggcttgagcgcggtggtaggtgtcaccgaagacgggggctaggatgcccagggaggcagtgtgggtgaagattgtacccagcgcaatggcggagggcttcacgggagggagatctatattgtaagttgttagtttccaagtacagtcttgggcatgatgaggttatcaactcacagtgcagggtagtcatcttgaagttattatgagtggttgatgtagagtgacaagtgaattagaagagttaaagtactttaagtactgagagagggcgtttctgcaaccagggtttggaggtgacgtcgtcatgattcaacgcaactgtaggatgccgagggccaatgacgtcaactcgcatacggggttagctatgtataaccaagatttcgctagaggaaatcaagggtgatggatcataagttcagatgagctaccttgtggggaaagtaattaattcgttctatggctgtaggcgaatccttggacgtcgttgcggagtgttggggtgcatcattatagatcgccatctagatgaaatccctcaattaacttgacttgcataggcagaagaacttggaatttgaaaccagcttaaatcggctagtactacataggtagtaaatatcgtcaatgctgggctcctgtatgatttatccaccttcgaggtaccatcgccaggtccggacatgcatgtagatcaaggggcgattggcaagctggcaagctcgcaatacatgaacatattgcacaataccctatatctagatatcacgatcgttcgactcaattccaatttcatctttcttttcaattcatctaatcccaagactcgattgcgttatcgggggatctttcaagccgagcggggacaaaaagctgggtctagtccggctacagccaccctcttctacgacctaacagtcctgcggagccttcgggtgtatgaaccaccagtgcccattgtcaataacacaaaaagtgggcacttcgggtatttatttatagctattacttgcggaacttgcaatggccgctagaaactcatgaaaacgaaaacaaaaatgacatgtatttgcttgcagaatgtgctggctaatcaaacaaagacccgacaggaatatctgtagtaaaagattagactggagcgatagaatggataattggaaatgcatacttgtcagggtagccgttctctgtaccaagctcatacttagattgtgaagccttcgcagcagtgttgatattgcaagggctgggcggcaagccgttggcacccaacacaccctgaatgctcttcttatcttgcgcaaagagagccgcgaggccaccttcttcgccctgctccttaacagcaaccaattgctgctctccagcctctccgatcttgagaacgtcgtccttgggagcggccttgcttccaactgtgagcagaccaactgcatcggcctggcgcacagtgctcagttgagggtagctcctccgagcgtcccgcttccagtaggggttgtcggcaatatcgcccgcgggtatagtgactgggtcatcgtaggcaagagggggcaaagatcccggggtgggattacggaattgagcgttcagggggataccggtggaacgttcggggtcgacagcgagaaggcgacgaatgcgctcccagacgccgacggactggactgtgtatttctagagcgcaaagaggatcagcacctagcgcacgaccgtataggttggtctcctaatttctgtcgatatgaccgacctgcttgatagagatggcattgtttgtcgccttggcggcattcacgaaaccgcgagtcatggtgaaaagactctgccctatgatttaatatcagcccattgacacgctaacgccacgaggttgtaagagccggaatttgttctatgcccccgagtcatttgacttactgactgaaatccctgaaatccgtcaagagtccgtagcaagcctctagattgagccggtgcgtgaaggtaagtccggaggaggtacgatcaccggcacggattattttattaccgaaccaccacaaattcttgtattagtaattgaccgacgctgcaactttctatgatcaacgaaagctgagtctagttatgtcttgcactgagaaaaaatcagattatagagatatggttgaaatatcgagatatatacttggctaggcatctcggtaaccagaattatttgctatggaattcctcccaacaatgtgttttcaaacatatcgctatcccacactctctacaaccagacctccctcgtggagcttgttcaccccttttgcctttttctctcttaaactgacaacaaacacaaggaattttcttgtctaggacacttcgccggtgaattctgacctcaatttgctggtttggtagaggtcggactcgtggtgtttgtggcaattcggctgcaaattgaaagagtttttgatatagcccgtagcgaaactctgtttggctcttcttcttagcctgtcgctgctgcttatagacattttgaatgcgatgagcattaacaattgctgcatcaagaaagaaaaaaagtagtaggaacgacgtcttctcaggaatctcatccgcaggtggttgcagagcaggtggttgcacatcagatcagatgactgcacataatatatttgtggaaaacgtggtggcggaggtggtagaaaagcaagtggcatcttgacagtatgcttcgtacggccaaaacagcgaacctcagtctcatcatcaatagagatattgaaccctggctggtagtactgctgggcagctttctcgaatgaagaagctagaggttctagtttataccaccaacgtttatcctgtggttgagcctgctgctgaccatttggccgagagatatgtataaaacgcttgatctgctcaaagcgcttcagcatcatataaagatgaggaagatgcactggccctttctgaatatcccgccaccagtagtggtaaacacgtggagattggtgaagactcatatatactagagtaccaaagaagaccttgatatctgctatagtagtatccgtccaggccctggcagggctagattcggttcctcctgcttgtcttcgctgagtatattcattggttgactagctaatgaattcgaagatatcgtcgctaacaaatagagagaaaagcgcggatgggctatcgatatcgagcccactaggtagctggagctgtggaggacaagaagacgggaataatagctgtggtgattccacaatatgttcgtcaagcttgcgcttggtacccttgggaggcatagcgggcaggcaggcaagtacgttagtaggtattgttatagaaacgcgctcaaacaggccatgatatccaatcataaattaggctaatacactaatcaaactgcgctaaaggtctttcccaaaagacagacgaggggttacatgggttcatgctaaatgccattcatcctatctatccatggaccaggctttttgcctacggagcgggttctccttaatgtaacgcaaagtaaaatacaacatacactcctgcaacaactagctagatcaaaaaaatagtcgtgcccgggatcgaaccgggaatcttctcggtgtgagcgagacgccatgaccattaggccacacgacttgagacgataattgaaagttatctttaccatnnnnnnnnnnnnnnnnnnnnnnnnnnnnnnnnnnnnnnnnnnnnnnnnnnnnnnnnnnnnnnnnnnnnnnnnnnnnnnnnnnnnnnnnnnnnnnnnnnnnnnnnnnnnnnnnnnnnnnnnnnnnnnnnnnnnnnnnnnnnnnnnnnnnnnnnnnnnnnnnnnnnnnnnnnnnnnnnnnnnnnnnnnnnnnnnnnnnnnnnnnnnnnnnnnnnnnnnnnnnnnnnnnnnnnnnnnnnnnnnnnnnnnnnnnnnnnnnnnnnnnnnnnnnnnnnnnnnnnnnnnnnnnnnnnnnnnnnnnnnnnnnnnnnnnnnnnnnnnnnnnnnnnnnnnnnnatggtaaagataactttcaattatcgtctcaagtcgtgtggcctaatggtcatggcgtctcgctcacaccgagaagattcccggttcgatcccgggcacgactatttttttgtctttgtgtatgaataatattttgtcttgattcattatatcttcgtactaattggtgcctatcgccctggaagtgtaagcctttctatatcttgcgagcttatatcttccatagtttgtattctatttcaaatacaacataaagtgcataatttattagagttgatctatgggagtaataactacggagtatacaaactgcgacagtaacttgggttctaataaggaaaagcagactgcccgcggctttagcaccaagaataggtagaaaatcttcaccacaagcaggccgatcaccaacacgcttgagataagccagaatgttcttttctggatcgtcggatttgggggttcccgggtcctttgggtcgacagtcccagtaatgggagacgaagggtttactcttgtaccgttggtggagcatgagagtatacattgtcaacatggaggaagtaactattgactagattattaacagattaacagattacatggttaactaggtagttgttaccgagtgcatgaaatgttcaaatgtacagatttcaaagctgtaaggtgagctctaatatagcgaaataaagctacgcttaggttgtatcgcgagtcgacatatgcggagtgtgtggttgaagaagcggaggaaagacggcgtgtgacctggttcaatatctatcattccaggataaactgcgacccagcggaaaaagtagacatccgcgtcttgagaatattacaggcctccagccttcaagtgctctagcacggcatccttaggcaaatatactccgtaatcgtatgtaacattgccacaaagcgccggcctctaggactcctaccgaggcccggggtggcttggctataactactgctgcaagtgactttataactaatgtattattgtataacctcagcggtactccataactataaaacccgattatggtcatctacaattcttgtcgctatggcgaaatatagactttcttatcgtctcaagtcgtgtggcctaatggtcatggcgtctcgctcacaccgagaagattcccggttcgatcccgggcacgactatttttttgtctttgtgtatgaataatattttgtcttgattcattatatcttcgtactaattggtgcctatcgccctggaagtgtaagcctttctatatcttgcgagcttatatcttccatagtttgtattctatttcaaatacaacataaagtgcataatttattagagttgatctatgggagtaataactacggagtatacaaactgcgacagtaacttgggttctaataaggaaaagcagactgcccgcggctttagcaccaagaataggtagaaattttgtctttatatgtgaacaatatgtagtcaattagtatagcctaattagtagttagtatctactacagactgcaagacttcctcgctctctacagaaaggagtatcttggagatatttacttttgcccgccgccagataatgcgcctagcggatgcccttgcgatatcggaaaggctcgcaatgagggaaattaactcatggaaaataattccgattctcaaatagaagagacaaaggatatttcaagccagtcaaatgttattttctagcaatgtataactataaaaagcttaaaccagcgtccagtaaaccattttcggcagccgatttgccgtcaaaccagtgctgtgtaaattttcttccatctaggcatgttttgattctcaatggccatcatagccacatattcggcctcttcgcggtcaatctcagccttgcctgtccagatatcggcattatgaggcttgacaaactcagtcctcttccaaatcttccacccagcaaatgccatgacatagagggggattccgatatatgaagtgataaaggtcttgtagtcgaaattgccgtatttttccgggttgtggataaacacaccgaagctgcgagtgaaggccaccaagactgagaaaaagagcgcaatgcaggaaccggtgattcccaggggagctttgtaggccagtgttgcctcgtcgacgccctgtgcacgtcgggcgcgaatgaagaagatgtgggtgatcaagagggagatccatgtcaacactgtgagagtaggtcagaataccggacacatttcgagccattttgggagggaacatacatccgaagattgacaccatgtcagtgaagtatccgaatacctccttggagccattggaaacactcataaaggcgagcaagcagaaagaagccgacagccccagggcatagactgggacaccagcttggttagtgcgagcgaagattcgaggggccttcctctcacgggcaagaccgtatagagtccgagtcgcaatgtacagatcagagttggcggcagaaaacacaaacactaagatacagccgttgatgatgtgaggaagagcggcgacttgcttcatcgccaccacgaaaggtgaggcggcagcagagctcttggccttggtagcgaagaccaggtctggagagttgtacgggaccagcataccgaggaagagcacgctgagaatatagaacacgataattcgccagaaggtgagcttgatagctttggggatggtcttccgggggttctgagcctctccgacagttacaccaatgagttcggtacctagcaaaaaggaaaattagaatgcgaaaggcggaaagttcaatcacagaatgtccataccgaggaatgcaaaggtggcctgcaccagtgtcgaccaaaaagcgaggaattttccaagggaaccctcggtatatttagtagcgaaggcaccgggttcgttccagtatcggaagcctctcctatcgtggtcgggaccaccaccaagtgcgaagatgaaagtgcacaaaatgattcccaggatgacaatcaccttgaacgatgagagccaaaactccatctcaccgaaaatcttcacgccgaagcagttgatcaatatgattgccaccatgaagatggcaatccaaacacccgggttgacattctctgctgacgtcctcggccaataggtaatgactagagcagcggcggtaagttgcgtgggtggtaggataatatatttgaggtagtagctaggagatggttagacatccggtttatactagcatgtagcttgggggttttactcaccaccatccgagagtgaatccgagagcagggtcacagaaacggccagcgtaaccagtgaaaccggaggacaatggtagccaagcagccatttcacccagtccacacatgaccgtccagacaacgaagcccataaagcagtatgcaataagcaaagatccaggctggttaggaatggttagtcaacggcaaaagatgaagcaagtgaatataacatactccggcgctataggcttcagtcagtagtgtttcataaacaactgtatccaaagagaactcacgttaaagcgctgccagtaccaacaaccaatccagtaccaatggcgccaccgatggcaatcatggaaatgtgacgagccttgagctctctgtgaagcttgactggctcatcctgttcaccttctttgaaatcccccgagttgtcaaagtactcaggctgcgcctcgatagtgttaatctcatcggggtgacccatcttgctgtaggccgaactgagaatcacaacacagagatgaagagaattgaccagactccaggagtagttgcggggggtgcgcggggactaaatgggtccaacgcacagtctttaagcgatctgctatctttcgcctcttcgagtaaagactaatattggagatttagtgactaggacatagttagttagctgtggggtgccaggtccacgagccagtatttcactcacgtaactttttggtcagagtggaggcataagcagtcagaatgcgatatatacttcgggggcctttgcgtccttgcgtcccccaagtgatcttattggtgtcttattttctccaagttatcccccgcaatacgtttttcccacagaatcaaatgcatgatcgcaaggaatattgtcccctattgatatttctggatgtgtcccctgtgttcctggatccgcttaaaaagccctatacgaaccttctaaggttggaaggggcggtccggccaaatgcgccaacactgtcggcggtgcgcttggcatccttggcggacttggcacggttacactcgggctccctactaaatgacagatctatagttacggagtagttactccatatactggtccacactgaatcctttatcagtggtcccctcttccctgtgggtatttgcctagaaccttggaagataaaaggtgtattacatattgtaagcaatctgattgtataacaaattctcagtaggtttcagtaaacttccccacaagtatttactaatggatattacaaaccttgaaaagcgtttctgatcatgataaacaggccaagccaggatgacacagcggtctcggtcaagtattcccaagaaaggatggagttggtctgaggttttgatttctacagcactacggagacgactagctttttgaatgggtagatgaatatcatttgagcaaatagcgggaatttccaatatgtattatgtagcaagtacacacctgatcggttctacctaagagcttctctgtctgagctcaattttcatctttttttgctctcggtgaacaaacactgggtcaaaaaaataccgcaaagtccttatctctctattcttcttggtatggagtacagtttatgtctcatgaaatgcacggacggcagatcagctcattcgggccttggctagaaggctagatggaactttctaaaaaaataacgtttatcttcgcggaacctcaagcgaaatccggaggcctttcgataagacttgcgtctcgttagggctgctatcagaatcaagctttgcatttgagtaactgcagaattctcctattatcaaactttatagttaaaattttaaccaacttcctaatttggaagtctggtcttgggaaccttggcaggtcagatctttcagtctcggcttgaagccggcacctacttaggaagtgagattcaatcctcttgaaaagtcatatttaacgcgttgtaaagatatactatgttggaaatgttgccaggctagaagcctgttaactaggtacaaatacgattccctcttcttttctgtcctcctctccgtcagttttctctctctgtttgtcgcttgtattgcattcccttggggcaccgagacagttaaattctgattactttgcgggataatgtcaaaatcatgacctgtgctacatccatactgtggagcgtggtatatttgtgtgcacatatatatatctctaccatcgcattttacttgacctgcagcagtcgacttatttccagttaccggattttattgttcttattcgtaattcctccattacaaatccatacttcattgctataagctcatctaataccggattcagatcggcttcacaacaagaatagtcgaccgctcatacagcctctatccttgacaatgtattaagatgattatatccaagaaaatcccgatgtgtttttggatgtccttatagatatttttatgtgtatataaacgccgcaaaaaccatgacctgtgcaggactttcctacatgtcaccagggatgaccaaacgctctataaattcctttagacggaagagtaatttttttttttcatcacaggccaatgtcataagaagcaaaggcgaggtttcattggtagaataaaggctagtcttggatacctcaccaaggtcttgcttgatgtcttctcctggtacaagatgagccacaaagttgaaggtgtctgtaaccttctaccctggaaagaacaacgtgattggttgtacttcaatggaaggtgcaaccgagggacagatcaggaaagtaggaaggtgcatattcaaggaaggtacgcgttgtctcagcgcagagaaggaaagaaaggagaagctaggcgagaaccccagtcgtgacgaactaggaagtgacgacggagcggtgcccagatggaaaggaaacgttccttctatactgggtaagcgagacaagcgagtaatgtcctcatttgcatggtttgttcagaaagcccacaaacccatgcgactggggtataaaagggtaccctcccccctgactcccttctcttcttcttcttcttctcctcttcccatccctctgaccaccatctctccgtagcccccatgagacagcgtcggcagagggacccgtagcacctgctgcccaacctaccacagggacatcaactttaccatgttgtggaagtccgtgtaggtcagcaacaaacatcaaacctggctttctcgtggatgttcctgaagtcgtggctctcattgccacttgacgagtcccacggaatacatggggggtgtaaatatccgtagccgacgactcgtaggtttctatgcactctcgagctgtttgtaattaatctcagcattgtgcgcgcctctagttcctagttcccgttaatctttcaacattactgaacaccaagggtgttcattaatatgtaggtagtcaccttgtgctgtcatcggtgctcggcgggaccctgagctgcacccaatcgggaaactcgcgaccgcctaaagtccaatacatagagcgacacatgtaagtttattaaagccagtatatgagacttcatttaaattcttttgaatggatattctgacagacaaggaaaaagggggaacagaccaatcaaagtgagagtaaaaacaaaatatcaaactttaaagcctggtattgatatacaaagtaaaaagacacataaaaactccacggcggtcaggttgagtcacttaagtttaccatgcactatgaccgaagaggcaaaaaacagtccaccatatcattagttttaagagactaacggcggtaccacatgcgtgtgattctggtgtgtcgcatcttcttttgcagctggaagataccgtacatcaatgcctcagaagtgggtgggccttgggttttgttagtcaagttcaacagcacaagggcaaggcaagaggaaatgcttacatccaggcacgtagatatcgaccggcacaacccggtcacagcctcgaacgaccgagtaactgtagtggtagtagccaccaccgttggcacaactgcccatgctgataacccaccgggggtcgggcatttgatcataaacctggcggagagcaggggccatcttgttcgtcaatgtaccggcgacaatcataacatcggactgacgcggagaagcacggaaaatgattccaagacgatcttgatcgtaacggggggtagaaaggtgcatcatctccacggcgcagcatgcaagaccgaaggtcataggccacaaagagctttgacgagcccaattggtaatctgatcgagggtggtcctgggtgatatagggtcagcgaaggttccaaggcgcatccaatatcaaagccatagagggcaaacgaacaaggcatattgcatagcaccctcctttttctcctggctaggcaaaggcacctctcggcgagtcttgccggacgcggtcaattgctgggcgcctgctgatggttgacgctcgagcgctgtcgctgatttgattgacgaagtcgagagggccgccaagggttgggcacgcgggagagaggcaacgaaacggggtcgcgcagctgttttctgttagtgaattgacattgtcgatgaggtgaagaaggtcctaccgcacagagcgccagagatggcgggcttcgccatcggaagcatcttgagaaaagtctcttcggtggagatgaacagctagaatgaaaggtcgtgatccgggatttgaagagattagatggttgcagcgtcggccagtgacgacaagcaatatcgaattacaagagggcagaggtggcgggccgggtaactgcaagacaaggagaaccccaaaaaggttccgattccacagtggaagaacatgatgtataccagcggttcgagagagatgacgtaagctatcacctcgcagatcattggcccatcggctgtatttttcagtcacggaacctggtatggtaaaagcggtgagctgctcgtaaatccaattgcctgtctggtcattggctctgagctcattttgctgcctgggtgcctgaacccgtcttccccatacaacgtacgtgggggattggagacaaccactccactactgtctacactttgactacaaagtaaccgccccttaaaagggctgctcaattcgagagcattgtggacatgatatggagagctaatacctcccaaattagaactctcacctgatcacagtgccaagacaagggaatcagtccctagttaaaccacaagagcccaagtgattgcgcagtccccatatattgccacgtcaagggctatcgcagaaatggcgggtcccaaaattgcctgcattggcgtgatcgggaaggcagtacgtatcactctactaacttgctcgtctggaactgtccgtactgactcgattgcaggataaccctcttcacatttccctgtttcccccgtattcggattccactatcgaattctccttcttactgaactcctgcctcgacatcttcgacatccgctgcaaacaaacatccattgatcaggatctaggtctactacatgcaattgacgaacgacttgcggcctatggatggttgacgaccacgggagtaaaactattgatcattgtggattttttcggtcaggaagaggccagcgctggaaaacaagcaggcgctgcgattaatggcctgagagattctgatgtcaagccggtgtgttatccctctgtgcctggcgagtgcttcaccccctaattatttcatacaggcattccgcgcattacagagcgcatacattcagcttttgcagaatccattctattcccccgacgaccacgtcccgattgccgggaatacagcttcttctttgtctgcttgccagccaatctctaacaaaaagttcgttgcggatgttaaacgtattggggaatcgtgggctccaggtacttctctgtaggaagagaacgaatgtcggatttgaggatacagataagactctggtcaaccaggcttcccaacttacattggtacaaacagcaacaatttcaccaggctgttcggataagagccatatcatttctttgtgattaagctacttttgacttccagtccgtatggcatataattcatgaaattctggatataatagaacaggcagtaaaaataggatcctttttgtcatcatgctgattcgcgttggtagtcttcattttcggcttcggcttcagtctgctccagggcaaccatgatctctgccatttcacgaggatcggaaatagcccatactccaccacctttggtgtcaactctcccgacctctttgccaaccaaattcctgccaacctttcctggtccaattccgatccaccgcttcactcctcgttcctgatgaagatagcgaatgctatcccaccacctgactgtgtccgtgcactgtcttgagaggaggtctttaatgtctgccttagactggaagggcaaggcagtaacatttgatatgcatggaattggtgccggaaatgtgatgttgatcttctcgacagcttctctcatataatctgcagctagcgccataaccgggctatggaacgggcagttactcttcaatctgacagcccgcgggtcgtaacctccaaattgacgcatttgcacgagaaggattctgattcgttcaatactaccacttagtacgatttgattttttgagttgatgtttgcgacgaccacttgttgaatcgatgagacgcgattatcgccgtcgatttcaatacccggtgattgggagccaacaaattgctgaaccgtgcgaagcagaccttccaggtgctcgggatgacagagaagtgcaaccatgccatatgtttcaccggattgctcggttaaatggcgtgtacactcggccatcatttccgcacgatggcgaactaatcgtaaagagtctccgaattcaagatagcctccggcaaccaatgcagagaactccccgaggctatgtccaagcgtcacaccgacccgagatttagtatcgaatccaaactcctgctccagaatacgaagtatcatgactgagattgccatgactgcaggctgtgaattttccgttcggttgagctcggagttcgggccatcggatataatgctggacagtttgaacccgagggtgctatccatttcgtccagaaccttcgacgcggtgtgagggaagtgttcaacccaggtgttggccatgccaacccgttggactccatgccctattgcgctttgtattagcggtcgtttgagactcaggggcaaaggggtgggggcgatactaacctgggaaaaagagggctgtgtgcaggtctcgtctggagggtaggatagtaaggtttgttgttctggaatttgtaggcgaaacttgcgatacgacatgcgcaataaatcttagttggaggtgacctctgcgatgcgacaagcgtgagagcatcttctctatagttgcaaccctaagcaaccctgtggggccttgatcttaaccgtatcaacacaacgcatacgcattgtggctatttcgtagtcgcgagggtgagatccgctatcccatggagcgagggagtgttgttcttgagtccatcctggtgtttacgaagggagcagtgagctccgtgtggggtgatatgtgggattcacgtgagccttttcggggtagtcggctacggaattaatattccacatccaaccggcaagtgttatgcatatgtctctaccggtagacctacaatggagcttacggagttctcacatataccgattctgtgcgtattctgagagcaaccaataatataaactgtttagctacgttctttagcttcatagaatatagctaaatacctaattgagattggtgcaaagtatgtatgctatggtattcgctctatacagagccccacatttcaatgagcagaatgggctggaataatgtgaaatgttattctagagtcaatttaaatggctattcgcatattatatacatctagaatatgttaccattctgaatgcatatagatccatgatatatagtgtatttaatagtacatgtaacttacactcatgtaccgacctgtacaatatggttattgtctcaccgctttcggacaaacatcctcgattgttattgaccaaccctatcactgctatcaccttgctccaatttaaacccatcctcttgggagagctttcttctcgctctatctctctcgttctctcaattacgaccttaaattaacaccgcagagtgaatcggacccccaagggtcaacaatcttcgaagctttcgtaggctagcgtgtgttcgcgacaggttgcgtacattgaaaatgttcgtcccaaaagccggtggtcgcaatactcgtcgacgccagcgaacaagctcagatgactctgtcaaaccaccaaaggccaagaggcagcgctctgtcctgcgacgcccagatgaatccccttccgataccaatctgggacgtgagatcgcaaaattagcaacacccactgcgccaaacgatgacattacccctacggatctgatgaacgatttgcatatatcagcccgtggtgcgaaacaaggcgatgggtctgggaataataacgaggggacaatcgttctggtgggtctttcacatctttgcgcgttccttcagaccctcaagtccaaagtgctaacttgctggattcaaagtcaagcacagatttctatactgtcgatcaactgccgtctttaccagatcaaattcgtggcttacaatcaggtatctcaaattctatagctttcctcaccttgggttgcgctttgttgacactcaccctttgaacgcagaacccctcaagtgctttttcggaactggtcataactacgcattggctttgacccgctcgcatgccatcgtgtggccctactctgcgcccgcttcttccccgtccccgtcggagacgttcacggtatcgattccggagtcttgcagagatcccaaaggtgccgtcccactcggagttctattatccacggccacgggagatcacccaggtctactagtgatcatcccttctacaggaaaagtcatttactgggagactgtatccagtgccgcgtcattgggtttatcccggcaaaagcagaatggcatccaaggatccacccctggcatgctttccggtgagtatgccacggaaatactcaacggggagccttcgggagtgatcgtcacgttctcgtccggacgagtagcacacatcaccttgagggacccccagggaaagccttcagtggtcgtgaatttcctcagaagcaccgcaggaagtggaggcggtggaattttcgggggcctcaaaaacgtattcgcaggcgggtcatggagaaaagaggttactgcggtccgggccggtggttctcatcaacgcggccagcgagatatcattattgcaacttcgaccggattggttgagatatgggacacgcattggaaccatgggaacaccctcaaaaaaagatacgatctcaagaacgaaattatggacgccctccctgaatatcatgcacagccgacaaacgatacagagctcaaagtcatggactttgtgttctctgccctgcagtctttcgacgatgctgtccaacttcccgatgggtcctggcgcctctttctggttgtcaggtcgccacaatggttggaaactaggacgctattcgtggttcaagttcacctatcaggaaacgaatctcgtgttatgtcaacacatgccgtggatgttcgccatattcctgtctcccaacttgaagcttcgaaacccaggctatttgtgccgaagccagaagaaacggcttttatcctcattggccagtcccttgttattttgtctttaacaagtgttgaagagactccatcctcacaactgcttctcgattccaacaacctgcctctgcctttccaagataccatccacttccgctccggcacagaacacgaaatcctggggtccatctcagaggaccaatcgaacgatttgccttgcgcagcatgtgtgcttatgcttcggaatttcggtgtaattcgtgtgacggttctccctcgtcctagcacagaacaagatgtcgaagagcctcaggtcacagcaaagcacaagcttgagcaggcggtcttctttgggaccatggcaaaaaatcctttgaatttatccagcgagggagacttgaacttccctccatcagaaatggagcaagcatctttggaaatctgcagggagctcctccaatcagaaactcgcttcattcctaccactgctatttcactagagcaaaatctccgcttgagagcaaaggcactagatgatctcgcctcattactatcacgccaagggaatcctttgagtcggccggcaaagtgggagttgctgtgggctgctgaaaaaattgcagcacaacgagctatgtggaagattcaagaggcctgcaagacaaaaaatggagacgaagaaactttcctcggtcatgtcattggatctatgcacgaaaaattcaagactccaatcaacgcccaacacggagagactgatccggtgcgtcaatggttcctgagagattcttatcgcatggagcatatcatcccatggatcaagaacgcaatcaagtccggtcggggcaatacctccaaccctgcgcgcgcattgtcagagaagatcctggcggcgagtgagctttttctggcggtcaccgaaactgctttcagatatcgcgatgagcacgttgcactttatggtcttcatggagacttcctggaggatggtgtgctttctgatggatatgaagatctccccgagttctggacatcaagagctgttggttactctgaagcagggcatctactcgatttagaactggatagttgccggtcatggataacacccgcatcggctgctgatacccctgacacacatgttttgaatcaagttgcgagaaacagctatcgacaccttcgcgtgatcggtcaaatgcatctcgagcggactcgatggctctctgcgcaaggagatcccaagctaatggatgaaagtgtctcgattgagcaggcccacgtcgaagaccgcaaatggcaactcttcaagctggctggtatcggccatctcgccgatgccatcgaattagcagaaagcttccgagacatgggagcattggtcgagttaatcatcgagctccaggaccaaaaagcaactcaaaatccgcgcgcagagccaccaattgacgtttccacgactcaaactgagatcgatgcggatcaattgatcgccaagtatttcgacaagtttggtgacctatgggcggatgcatacttctcccggcaaattgctatgggttatccaggaacgctgtttacgatgcggaaataccaatccgccgtcactcgattccttcgaagtaaccccgcatattctcgcctgagctggattaacgatgtcattggtgaaaacgattatgacactgccgcagtctcattggagaatctagcgattggcagtgaaaaggacttgtggagccaccgtgtagagatctcgatagccaagctaggcaaactagcgacgcaggagcaaatggattcacccgttgtggcttctactttgcaagaggatttgaagcgtcttgaggattacgttgaggtcgatggaattcaagacattctctatcagtatgttgagcctgtactgcaaggtgccattgacgaaaaggcagaacttgaactagctctcggtcagtatggagaacatatcttcgaagatcggccatcgctccatgaaatcttaagcgacgctctctctaccttgatcgacaggcaggttgtcggtgccgatggcctgattgatatcttgacgttgatgggccctactcagctcgcagatgacagcgagagcgagattgtacgaagcgagttccatctcgcattgcaggttcttgattacggacgctatggccagcgagatcccgcctatctcatggctctacagaggttgatctggcgacggtgcttgatcaaagatgattgggtagctcggggcaaagctgccgaggggcccaatggcgatgcacacaactcggtcgccgacacggcgctctaccgatcacttactgcatgcttggaaggtgagtttgttccgaatataagcacttggactatcgagctaactaacgtactatatttagaacctcgaaatgctggtccacactctgtttacacagctctctcgcccgcggaggctctgatgaccgattccgattccgatattcttgtgtcacggttccgcccagagcaaaaagctcgtgtggcagccgatcttcagaccgagaatgatattttgcgccagtgcattgatgtcggaaaacttgatttctggttccaaaacctccgggaaactgccgaggtccatatatctcctcccaaatagaccgcctatgattgacggtgaaattgctggagcaaatgattgaattttctatacaattgacacgggtggcggatgaaatggcggcgttttcaatattatcactcggttatccggtggccgatgggtcataatatgttgtatgtatgaaatctcaagagatatttcaattgttcaagcttcagtaagaaaggccctaaagctacgttgtacttgatgaccctcatttttagtgaaatatgaaagtcatgtttgatttagtttgttttctcagactcccatgcaatagatactggttcggggaaccaccgagtcatggagtcacgatatgatccctagaatttaccttgttcacgttcgacttactcgccatccaaatatcggaagctcaagtcgtcacagcgccagccgagactctttaatacttcctgccctcacgatcagcctcgctatcgttgctgctgacagtatcgaccttggtcacgggattatcattcccggcagccacatcagcttcaccaaggatctcttcctcgaacaccggctctgggtcaatagcctcgaacttagtgttgaagtcggccagaccttgggtgctgctgttggagcgacgcctggcattggcgaacgagtagtcagtgtcttgcatttcgtcgcccgatcggcccctgtagcgagagaaatagcattagctagctgcacacgctttattctgacgtgcaggaattaccaattgcctttgccgcccccgtccttctttgtcttgcgcggatcagcgtcagttgggccggacttggcgaagtagcgtgggatgttttcacggggtcccgtcgcgctttcgacttggtgttcgcgatcgttcattttgtgggaacgagtcactaggagttgagtcgttgggtcagtggaatgttcactggggaattgagatggcaagtatataggtatggtttgatgccaaggtatagaagtatatctttcacggtagaagcttactgttgtcgatggtatttgatgtgatggtagatgaggaattgtgttcaaggagagatgggaaatgaggaaaacaagaaacatgagagcaccagatatcatgcaatccgagaggggggcgtaggactcgtgacctcatacccctagagagtgcgggggttggactaatgggggctccaccaaccttatttcgtctaaacatcgtcgagatatacaaacagtcttgatgaaaggaaaacaggcatgtatttcttgttctttctttgaattgtcgactcaaggccaagcaactatgcaaccaatgctatataagaagcactcacttcctacctttgagtttaactagcatgtcgattcagtaggcatagtctgatatgacatatctatatcggtattctccttctgagattacgtattctgtccactcaaccaggtcctgattgtatattgtttacaattgcttaactattgtgagtaatataagtagatatagcttcactagcactacataatgctatgttatgatctttgaatatttatagttatatttcccctttccccagtctcatattacatccttggcttatgaaggagctcagcatgaaaaagaatgtattctcagagatcgtacataacctcccggcactagcgggagagcggagcataggagcctatcaaacgtatccactaagaatgaatagcttcaataatacacccactttaatacaattgttttcgtcctcaaggcctaagacctcggatgctccgcaatgatagatggcagttgacagtgttattgtatccatatgtagtgaatttacccacatcagaatttggaacatagcactaggacggggatcatccatttgagatcaagattagaccgacgacagggctagaactgacctgtctccccacatttggtactagacacacggaagatgaaccgagtatgtatatattatggggcgaatgaggtacattgctgggggcgagggcatatagttggactaagcatcacgctcccaacaagcatactactacacggtagcaaactgaaaaggattgaacatgaatgaactactacccttgaatttttgggatcatgtctgagactggctacgcgtagctaaacgccggttcaaatctgtcatacatatttgaacttttttcttttcctatgaccagaagacaatgatttgcccaggctgaccagtacgtgacaccacttcattgacataacctttaaacattctcgaggacggtctccttgaactcccgctcaaccttctggcccttgtcatcagtggcggactctccgtgcagagacaggagagcaccgaggtcgaacttgggagacttcaggagcttaaccttgcgaatgtggacctgtagacatgtgttagcaatccgtgcgtatgccactctccaggttttgtggggggaaaaacgaacattctgcagggggtagatgccctgggtggacttctcgatctcacgtccaataacctcggggatgagcttgtgggtgagctgagacagagtgcaggtggaagcctcgcgctgaatgatctcggtcatcttcttgcgaatggcacggatctgggacgaagcggcgtaggtggtcttcttgatctggttggggcgtctcttggtgaaggcaatggcgaacaggcggaggaggtagtcgtcagtggtcttcacggtgatgttggcctcaatcagagtctgccacttgcggacaagagaacggagcttgtcggtggtgaagtcgagaccgtggaagttggtcaggcagttcttgccctggatctcgtcgacgcggagcttgaccttgcggaaggcgtggtcctcatcgttctggaggtcggcgagggagacctcgaagatacggcccttgagggagtcgttggcgttcttcaaaccgctggtgcggttgaccagagtcttgccgacactgataattccgttagccaatccaactctaaattcgccatgttcgattcgggtggtgtgcatactcgcgagtctggaaggtggaaggagcctgtcgacacgattagcattgggtacgggacgggggaaggaatataacgaaccttcacagagtactcgtccttgcgagtgaaggggtcgactgtgcgcttcttgatacccttcttacccttagataggcgcttgttcctgaacgatgaggattagccgtgtgttcgtgaattgaatggatgtcgtagatgcgcaagtaattcgataaattgaaagcaggaaaaggatggagagtagggcgcttactttccaacagccatgattgcgagttatctgtgtgttgttggaggacagacaaaggtatcgcaccgcgcgctcagagggtttcgacactcgactgggagggttgaaaacccacagaaaactcggctaagcgaggcgcgggccctagctgattatgtcatgaaccatcgtcatgtgatcgaacattaaaaaaaggttccactggattatcattatgtaatcacattatgtcatcatcgtgagtcgggccattgcattgcattacagtaacattcatacttgtcagatcactttgcgttgtattattacaagaatgtactccgtagattgttggctgttacaatagcgttcgtttgaaatgctatacactctacatgtgtatacatacttgtatgcctatgtatcagatttttgccaaaaccaatcctctttcctccaatccgcatcgagtcctccaaagtttcgaatagccaacatagaaatttccattcaatattctattgttttatataatgtagatcacttcgtggaaatcgccactaactgacatcacctatcggaagctggagacttattgttccgactccaaactaggcaagtcgccttggcatccattccgcgggcctactcccgcgcgagtcaacgctcctcattgcttcaactttcctctcatcccttcttatatttcaactttgtcgcaggttaagccaatcatggtacgtgctatcgaatttccttccccgactgccctgacccgcccgacccccccgaccgtggatagatgttaatttaaacagggcaagcgcaagaagtcaagctccaagccccaagggcctaagaaggtaaacgattcacaagtcgccaggctttacacccagtactgactgtgaaacatagagggagcctcttgctaccacattctcctgtctcttttgcaaccatgagaactctgtggtcgtcaagctagacaagaagcttggccttggcgatctatcgtgcaaagtttgtggtcaaaagttccaaaccggtatcaattgtgagtcgataattcggcctaaggcatcagtcgtaactggtttgactaacacaatgcttcaaagatctttctgctcccgtggatgtgtattcagattgggtagatgcatgtgatgcagttgcgaaggacactgccaatcagtatgatgcaccggtttctagtcacttgggacagagagggatcagcaagcagggcatatctggagagactgggcaggacgatggctacgatgatgatgaatactgatcatgggatgacggcgaacggcgcattaaggcacgatatcaacaatagtcgagttgtgagattcttgtatgtacacggtatttgatattcttgcggcatattcttgttgcatatgtttatcatatagcctaaaccccaagaagcgtctcacccatctagacctctaccccactaccggccatcaagtcaactctgaataggtgacttgtatgggaagtggaagtgccttacggcacctggaacagaccaagcaatggatggataatggaatactgaatttctcagaatttccgggtgaccttttaaccatcaacgtggtaggaaacatgacttttacatagagtaatatctgtcgccgaaatctcccaggccggggataatatacctatcaatcagtcagcatgtcaatcacaacatccaaggggtgcgatattctcacttcttctcatccaatccttgatcaatgaaagaggtcacaacccgaagtttagggaatctctccgcgaactcagcaacgcccgacgggctggcaatgaggttaaggaataggatccggtgttcagggacgcctctctcgatcagtgtctccacggccaatgttgcggaaccacctaggaaaaaaatcagctgggtggcaaggggcattgtacaacaagctcagctcaccagttgcaaacatggggtcgaggagaaggacccatcgatcagcaatgtcagtagggagcttatcgtaaaacagtttgggcatgcaagtttcctcgtcccgctggatgaggattttcccaatgcgaacagatcggcagcagtcgcgcaatccttgttccatggcctcgcctgcacgcatgatcgacacaccacagatctttccttcgaatttgacaccgaggtaggaccgtccaacgggggtagtgatagactgctcaacaacgggaaggtggttcaagccttcctccaccagcaatcgaatgatgcggttagaatagaagatgaaatcggcacggcaggttctcttatctctgatcatcctatttgtagtacaaaacatgagtctagggttaccttccatgtagaaatgggtcctcacgtcaagagagcaatcaactggggtgtttgaggtagcacgtgcacattctcgtaggagacttcctttgagactgtcgcagtgggcttctcgccatcgggccgatacaaaggaccaacgccctgtgcaggagaaggaccgctctcgggtttgctagccatgattttgttgcgtccaaagatgtgtgtgcgtgtgtgtatgtgggtcgtaggactagaacaaagagaaaaaagattggagtacgcaagttcacctaagacaagtacaagtagctcaaagtagaaggacaagagtccagagaggggtatataaggacagtgagttgtctcaaagccaagagcggggaagcagagggttttcttatcttttttgctatatctggaagctataccgcagtgggtgattctgccccatctcacccccctcggcctcttatcacctgcatcatctccccaatcaaacccccagacctcggatgtgctcaattattctattacgcgatcttctcaaaggaaattgcctaggtaatctacgcgcctcattgccaatcacctaggggtcactcctttgatgactgtgccacaccctttgggcgtgtgtaagcttcattgaacacgcaaggacatggctgtttcaagaaacgactacgttttactcaatccaataacccaattgcccatcgccaaaccttgattgccctctgagaaacgtatttcgccatcgaattcatcaaacaacgcgtgcgcatctggtttcgcacggtttgtgaaccgaagatggagaactcacaccctcgcaatcgacgactcgtaacctacggctctgctgccaaaagccaacccccgttgaataacgaaaggcctgtacactcatctgccgctaaaacaactcctaaagatatgcctttgcccaagtcgtcacgtctctcacggcccttccacaccaggttacagcgcgacaagaatggagataaacaaccgtctggatcggaaaaaatgaccacgacgcgaagtcttacgcaatcaaaacctatcatggaacctaatgtgtatgacttgccctcttcagacgatgaacatatgtctatggtccagagaaagcgaaggcgatatagccccgatggaaacaaagccattcctgtgacgaagccatccgtgaagccaaatgagacagaaatgagagatcgtaaggtgtcaccacaaatggagaagagggttcccaatagtcggtggccattagccaaaaagccagaagccgatcagcagacaaaccccgcggggtcaacgtcgtattcaagggctaggaggtctgtgcggaaccagaccaaggtatctactctcgagaatgaaatggaaatttcaaccgaagggagctttggggacggagagtccgtgcgaaagagctcaccggacgtcaaccagggctatgccactaaagcgaacaccacccctggtcgaaggaggctgattgattcgctcgggatcacggaacacacggttgaaacatctccagcgattgaaacatcaccggagagtccctctagtagtcagccgtctcgagatccagcccccgttgaccgagcttcgccaagtgcagctgtgaatgagtgtcctgccgaaagccaaattcaaggatctcctgcctcggtgccatctcatttacgaggttcccgcgtcacctatgcccgccagcgttcttttttggatgacatggttatgtcagaggacccttctatgcaggatgctccctctggcccaaagcaccgctctcagtctgtccaacgtcagttgaattacgaggctacttccagtgcccgtttaatcgtgccaattgaggataccaacgaggatggatctgtccgaagtattcatgagctcagacaagctgggggaaacgctcgttaccgaggcgccgtcgaatctatctttgaggatatcgaagatccgcaaaactcattgacgggtcgatgcaatgcaattctccaactgtgtggtaaacttctggatactggtctcagacggcggtttgtcgagtgcaattttgacaaaaggcttgtggattgtctatctatggatcttcaagtggtccccactattctagctttctgtgcctacgcactgggatcatcggatgggcacatgtcttatgttcttgcaacttccgcatggcctaagctcctgagtgcttcgcctgccttattgggcatgcaagacgatatactagtgaccgcaagagctaaagccagcggccttccccggcacttgcaaaatacaatccagggcactattccacagatatccgctgtgctttttcccgataccgcatcgtcgaagctgtccccatgcactctggcgttgtattgcctgaggtcgacgatctccacgatgcaaaccaagggaaagaaccctagcctctccacatctcttctgaaacctttggttcaagtgctcgtgtccgaaagccagcgttgtgtttcattggaaaaattacacccggagagctctcaaatactgtgcatgggcttttcaatcttggaagcttctactgcattggctgaatcgctcacaaaagagcaatgggatattctaggtccgctctctgaacttcatagcctgctctccttggagtcgggcactgtcagccaaatacaacccctttacattcgacttatcttgaatgtgaccaacagcaacccctccttctgtgatagatttgcaaactcggagatagttggggggctagtccggattgtctctgcgaactttggtgacttgaccgaagatgcgcttggacaagcgaataattctctggacagcgtgatattggcgctcggcgcacttatcaatcttactgaacagagtgaagcatcaagaacgatttttcttcactctgctggttcctcgaagcctttccttgatcaattgttgcatttattcatgactcatgtcgattccatctccacggtaagcttttgatcttttttgatttcgcattttgccgacgcattgaactaactggatctgcttaggctcattcggtcttggaagtacaccacaatgttgccgtgggatatttggccgtcctgttacttacactcaatttggatcctgatacccgatccaaaatcaagagctcactcgctcctaatggattagcagtggtgatatctaccgttgatgaattcctgcaataccatcagaagattgaacaagaaacctccactttcccaactcaaggacaaccggcgagtggtttcttatccagattacaagaacttgtcactcggattcggttggcagagcaatgaggagcgtctatccatgttttgcttgacggcagataagtgcgcgcttggtcttcttctaccggcatttcttcagactcgatgacgtggatttcttggtctgctggcagcttttgataccccttccatcatcacttttaattgaaccatttacgctgaaatgtcctacattcaatatccacctgggcagatgtccatcattgagatcgtcgtaagataatgacctcaggtcaaaccagacctcaatgttcaaaaaaagtaggattcagtagtttttctaatacagtaattttataaagaatatcaaatcgatggtcatagaccctgtggacctacacgtaggcaattatttatagagcgctcagccctgcctaagtggagttggagaaactgccgtttgcattgtttgcaggtcacaaggagttggagctccgcatgcttcgagggatttgccaccccccggcgacctcgtttctgaacatgtgtctctgaatatctcattgatccagttccatcaatcaaaagatactgtctatctgactttatcatcatcaatatctctcattcacattggtggtctagctgaatcttaccgcactacacaagatgccttccgcgcctaagcagagaaagatcgcaatcgttggcagtcgctccgtgggtaagaaagagcacctttttcacaacccaaatctctgtaattgcgaagagctaacacttatcttggataggaaaatcttccctcacggttcgctttgtcgagcaccacttcgtggaaagctactaccctacaattgagaacacattcagccggattatcaagcacaatggccaggactacgccactgagatcgtcgacactgcggggcaggtaggtgaaccctgtgcgagattaccggctgtttactgagactattcattctacaggacgagtatagtatcttgaactccaagcatttcattggaattcatggatatatcatcgtctattcagtggcatcgcgccagtcatttgacatggtccgggtgattcgtgacaagatcctgaaccacctcgtcagtcactgccgttctcacaaccagtacttacgaaccagcgtctaatatttcctatttcctctagggagcggatgatgtacctcttgtcatagtaggaaacaagagtgatctcaaacccgatcaccgccaagtcaccctcgaagacggacgtcagttagcggaggagcttcactgtgctttcaccgaggctagcgccttccttgatttcaatgtctcgaaggcctttgacctcatgatcggagaggtcgagaagtctcagaacccctcccaaccaaccggcgacaacaagtgcgctgtgatgtaatacgggagccttctaccggaacgcgtgtgtctctctcccggggatggtaagcgaagccatctctggatctctggatccatgagtcaagaaacgtggagatctctttcatcggagctgacaacactatatcttgctcttttgatgtccacccaattcagatctacggatatcttgtttgctaactcgattattgacttagagatcatcaacgccaatttgataacaagcttgatggcttcttctcgaggccttcctcttctctttggccctatttctattgcgtctttctgaaccaccggggttattgcatgaataatgagttttagggtcgaattatggaacatggatcggtaccatgcatagagtaatgaatctcaattgaaacaggcttctcgaagtattcaaagtgttgaatctcttgatctatagaaccatccgtggccataactagcctgttcggaagtaaaccggggaacccttatcgattaagtaatgcgaccccttgaggcccaagtgcgtggaggcacgcactttgattttcctcgtttttacccctccacaatttgagtcacccctctaccacttagactcccctgaacctctgaactccaatcgtcaatatgctggacctcgccgactttgtcactgagcgcggtggtgatatcaagaagatcaaggagagccagcagaagcgatttgctccagaggagaccgttgatgaagttgtcgcgctctatgaagaggcacgacgcggtatgatttctatttttttaaaagactagcgaaatcttactgacaggtacagcccgatatgaggtcacacagttcggttctcaaatcaatggagtccagaaggcaattggaatgaagaagaaggtaggcattttctagctagtctagagtatggggagatgcttatgcgttctcagaacaaggaagacgcaaccgaattgctcgcacaaaaggcagagcttgagattaagaagaaggagcttgaggaaactgctgtcgccaaggagcttcaacgcgaccgaaagattcgcacgattggaaactacgtccacgaatccgtgcccgtgagcaacgatgaggtatgggttatcaagtcgcctgggaattgaatgcgctgtgagactaacaagtctatttctggctacaggcagacaaccagctgatcaaaacatggacccccgagaacgccgaaatgcagaagccaggttgcctctcccaccacgaagtgttgactcgtctcgatggatatgacccagagcgtggtgtcaagattgttggtcaccgtggatactgcttgactggatacggtcttttcctcaacttggctttggtcaactatggtctggagttcctcttcaacaagggctacacgcccaatcagccccctcaattcatgctcaaggatctcatggcgaagactgcgcagctcgagcaattcgacgaagagttgtataaggttaccgagagcgaggataagtcgaccgataagtacctcattgctacctccgaacaaccattgtctgccctgcacgacagcgagtggctccaggacaaggaactacccattaagtaagccactcatctcgcacaggactaagcccttttgctgataagagaaacaggtatgccggttacagcacatgctaccgcaaggaggctggatctcacggcaaagatgcctggggcatcttccgtgttcaccaattcgaaaaggttagcatagatccaaatgccctggattttcgtgttctaaccccatgcagattgagcagttcgttcttactaagcccgaggattcatggcaagcctttgaggacatgatcagcacttctgaagaattctaccagtccctaaaactcccttacaacattgtcgccattgtctccggcgccttgaacaatgcagcatccaagaagtacgacttggaggcctggttcccattccagcaggagtacaaggagctcgtctcttgctccaactgtaccgactaccagtcccgcgctctggagatccggtacggcgtgaagaagaccaccgatctgaagaaaacctatgtccatgcgctgaactccaccctgtgcgcgacggagcgtactctctgctgtgtgctcgagaactaccagaaagaagatgtaagtgtcgaaaggtcaccgggtgaatctgacagtagctaactatcatttagggtatcgtggtcccagaggtcctgcggaaatacattcccggtgctcctgagttcctcccttacaccaaggagcttcccaaggatagcacatccaccaaggccaaggggaaggccagcaagggcaccgatgatgccaccaaaaagatgcaaggtcttcaggtttaaggagatatcccacgatgtaccttgagatacaaattacaaattacgatggtttagttcatgatttacaggcatacgtacacaggaatagtcggccctgcatcctgcctctgtccttgacaacgtagggctttgataatctgatctatttgacaaaggatgcatatattaaggatttttctatttaagaagactccagaagaatccctacaacatagttgatttaacaaagacattcaaaaagctatcccgaagatcatattaacctaaatgaatcaaatataaaaagctctctagactgtgtgttttctggaaggaaggcatcggctaagtcccctgatccaaacttctcctttgaagctaacgcaagttcaatcctcttttctatactgtgtcattcctccatggaagtcaaaactcaaggccaaagacaggttaaggagcaaggactcagaattgtgagtgagggtaagaagaatctgccacaaaatgtagtatatagggtgaaaaaggcgtaaaatgtgattcagatcttaaatattattctgaattagatagccaaagcagcaacataatataactagcaaacaaaccaatataacaacactggagttcacaaatatcgagcaattgtaggacttggctccaaactgcaagcaattttcaaaactcgaatcacttggagcctctttccaaccgccaagggaatgcctttttccaataccacactactgatctcatcgttgtcagctttccaagcccaaatatacccggcttagagaaataggcctctgtcattgttaaaagatgggagggattttcgctgttcaagccatcctccaaatcttcctcctcggttactggatgaccacgagtagcttcacagcaccaacactcagtcgtacagtgcccgatacccctgcccttagctagacagcgcttttcgcaacagccacagcttcgaccacagcagccacccctcctcatacaagcctgaataagctcttttcgaagataccaagcagggttctgtcggatctcatcatatatctttctcaacggtctttggggaagcatactttccgtattgtataaggcctgtgctatgttccacgtaacctctttgatatcctcgaggtcgctctcatatacttgaatttcgtccttggtgggatcttctagtgatctaaagtccttttctaaccgttcatgggatttgtctggtcactcgtgaaaaatattcgagttgtatgatcgtcgcaaagagcctcgaaggtatttgaagacccctgccgtactcaaagagtcgcttgttctcgtcttggtaattccgaacaggcttgaagtttccaaaggaatcgaacatttgtaacggatctaatcccagcaacgagattttcggcatggtcttgcggtccgccatgttctaagtcatgttagtatgattgtcacgtagataaaggtgggaactatttacgaacattggattcgagtacggagtagctgcaagttgtgagttatatctaggtaaactcgtgagttgattttcaatctaccggtaaatactacatcatctttcgccgcccttgcctaaagcagataagctcatgcaataaacatgtgatctgcatgtgattagtcaaaactttgaattaaaaaaaagaaaaagtctttgccccgcggtgcccctccataggatacagagagaacagagagattatatgcagaatagtatatctcaacatctatttaattatataaatagaatcaatcgatagtaatagctatatgaagtcagtgtaggtatgtagtgcaaatggtaagtccccgaaaccaaaaaaatcatcaagtccgattccggagaccttggaggcttacttaatttctattaagagtcatcccatatgaatcatatccccatcctcctcttccctgcttctttctcttcaatctgctacaatctgctacacacttcaatcatgtcaatcgcaagagatatccgtcctcgtcaggacgattccttcctcgctacctcccccaacgcctccttccactccccatccagccacagctctgtcctgaaccgtacaattccagtcaatgctaagcctctgaagccattcgccacagaagatatcaaggtcctgctcttggagaatgtcaaccaaactggccgtgatatcctgtcccagcaaggctaccaggtggaattcctgaagtcttcactctcggaggatcagctcattgagaagattcggtgagtcgcaatttaactctctatcggtgactcacttggctcatgaattctgttgcctttcagggatgtccacgtcattggtattcgctctaagacaaagctcaccgcacgagtcttgaaggaagcaaagaacctgatcgtcatcggttgcttctgtatcggtaccaaccaggtcgacctccaatatgccgccgaccagggtattgcggtcttcaactcccccttcagcaactctcgcagtgttgccgagttggtcattggcgagatggtcatgcttgcacgtcaattgggcgaccgctccaacgagatgcacgctggtacttggaacaaagtgagcaacggttgctgggagattcgaggaaagaccatcggtatgtggcattcttacaaccattctgttgttgggttgtttagctgacttttcaggtatcattggatacggtcacattggtgcccagctgtccgtattggctgaggcaatgggcatgtcagtcatctactacgatgttctcaacataatgtcattgggcactgctcgccaggtgaagaccttggatgatctcttggccgaggctgatttcattacctgccacgtccccgagattgccgagaccaagggcatgattggacagccgcagttcgagaagatgaagaagggaagctacttgatcaacgccagccgaggaaccgttgtggatatccccgcactgatcgatgccatgcgcagcggtaaggttgctggtgccgctctggatgtctatcccaatgagcccgccggaaacggtgactacttcaacagcgagctgaacccatggggggctgacctgcgctcgctcaaaaaccttattctgacccctcatatcggaggaagtaccgaagaggcgcagaaggctattggtgtcgaggttgcccaggctctggtccgatatgctaacgagggttcgacccttggtgctgtcaacttgcccgaggttttcctccgttccttgacaatggatgagcctgaccacgctcgtgtaagttttctcgcgcagtcagtcgggtttgcaatgatactgatttggcctaggtgatctacatccacaagaacattcctggagtgttgagaaaaggtagagtacatttgattcgaatgctgtgatctttttaactaacaatgccacagtcaacgagattattggtgaccacaacgtcgacaagcagatgactgacagcagaggcgatgtaggtttatccgtgtttctcatacaaaaacccacgcagaaacttactgttaataggttgcctacctgatggccgatattagcaatgtggacgctgctaccatcaaggatttgtataccagactcgagagccttccttgtaagactacatcctttctctttcgcatgaacttaaaagctaacaccacttcagctcgcatcatgacccgcgtgttgtactaaacaaccgattcaaaaacaagctagcccccgggctataatgctttaatcaacttaagactgatgaaccctataggggctcaatctcaattgcatgggacactctcaacgaggccctgggatactacaaggttgcaattgccaactccttagtataccgagttggatacgactgatgtaaaagcggtttagtgtatattttgtgattaccacgcaccatctactagagaaaaagctatgacatgaatgttttcattttcattttcatctgccatctgactggctcagtaaaatacattaagtgaaagctcgctagatatcatgaccctagcctcgactcccatctctgaatccgggactgcggctccttcttcgggatggaggatcccggcggtaatcacgtcgacctgtcgagcgccaatcggcgtttgaatgcgagccatgctcaccagagtctcgcgagcgatcgttgccgcggtcgccgcgctcaccgcggtcactgccacggtcacggtcactattgctgtagttaggaacgtaagagtccaggttccctggtctgggtcctgggcgcccttgtccggattgatttcggcgatcgtctctcccatcaggtctgttggactgcggtacttcccacggcgggcgggttggtacgggaggacgcgggggtaatccgatatctcgttgtgtaggtgggaaaggcccgcggcgttgcgggtttccgtgaggtgggtggtgtccatgatttcctggcatatttggtctgcctccacgaggggggccggggatgcggccatgtcgggagtctgctccgcgagaaccagagcttggccaagcgccgttgcttgagtcggaaacgggtgggggaactgggggcattggcacgcgctggctgcggaacttctttcggtcgagttcgtgggaatctgcgaattgggggatttcgccgggtcgcgctgggagtgggggcgtggtgaagtatgggtgcttcaatgcatccatggcgttgatgcgtttccgccagtctaatttgaggaattcgcttaatagagaaatagcggccgggtttaggctgttacatcgttagttaggggcccacatcgtcgagggaaaagtaacatactccttgaagactccgtggaggttcccacgtttgtaggcgaagtttttcacaccctcacaacccgggagttgactccatccgggcatattctcctcggtgggagtgcccacaagattgaatatcagttctgcttggttaagatcgctgtttccagcaaggatgggcttgcccttgaacatctcgccaaagacacatctatagaatattagaaaatgataagcctggctaatagggatggaaagcttacccaactccccacaagtcgatagcagtagtgtatttccgcagctgtagcagcaactccggaggacggtaccatctcgtgacaacaagtgcagtgtattctcttttggaatctccacctccttttccgggtaatggaggggcatcatcgtagggccgagcaagaccaaaatcagcgatttggagaattcctccattgctaattagcaggttcgccgctatttattctgttagctcggaatcatggtatatcagcattcaacacccacctttcatatcacgatgtaggatgcggttctgtgaaattgttagacaaatattgcaaggaaacgtgtttcaagatgatcgtactgcgtgcatgaacttgagcccttcgaggagttgcatcaagtagcatttgatctgtggttcggtgaattgaactgccgggttttccaggagcccagacaggtcatgttccatgtatggaaataccatgtacatgctcggctttttccgcccttcgcctttgcctcgctcgattgacatctccttgagctgcaaaatgtttgggtggcagagtgccttcatgagtttgatctctcggatggcggtaatagggaactagcccaaatgtcaatatatagctaataaagaacaaagagcttgtgaacttacgccttctttctcgtgatgcatgaggatctttttcaaggccacaattttggtgtccttcttagaccttgctttgtagacctctctattaaccggtcagacggtttcttgcagttataacgctgccgaactcacccgaatgttccttctccaagcttgtcaaggaattcataatcacggatgtgcgaacaaccagggaaacgggcctggccattctcgtacttttccagagatttaatctccatgctgactcgtcgcttgagctggtcgcccaccccggtgggggaagaaagagctatctgatgcttgtgtcaaaattatcgaccgtcgtcaagctctgcggtatgctttggtttgatgttgtgttcaggtacacggaggagggttcgagaagtcttcggcgacagatgattgtgggaaaagtgtcaagatgaatcagcggggaccttgtcggagagagccacgcgcgtcgagtgtgttataagacaagtccatatcatagtacaaagcatgtgtgacgagttcgcattgttcaaagcccgcgcgtggggagctcggccacgcaggaggctcaatataaacctgagtaggaaccagcccagtcaaggtataggcgaaataggagtcagacgactcttcaataacgatatagattattgttctgctgcttgtccttgcgaacaacccaaacactgcgctgcggtggaattcgagtgccgtcacgggtcacgtgctaccaacctctccgttccccgttgaaccgcagaaccctctgtcttcagatccgattcgagattggcgttctgtgaacaaacaacagccatttccagcacacagtacgtcttgcatgcacctttctctgttcatgtgaatctgtggaaactaatttctttccaatctacacagtcatggcgggcaactcctcccaccctatccacatccacccggtccgaccgctctaccgcttcactgcgactgcattgggcgcgagcatgtggttcttcgtaaggatcgcctccttttgacatggagacctcgtactgacaggacttctgcgcagctcatgtaccgggccaagaaggatggtcccgctctgttgggctggaagcacccttgggaccactgatccgaatataatcgtcgatttcatttttattgcgcaaccgcttttgtccctcggggcagcggtgatagttgggtcgcattgcgtactgtgtacttggactaggtagagaggaacagcgagccgggtgttaccgagcgcatgtcaaagccacaagttcacgatagctatttaccagccgaattgtatcataccctttcttttcaattttctgaaatggtaaactatggcctgagtgattgggacggagcctcattagatagatgactagatccagattatgacaatctaaatgtctatagttatgtacaagaatagtcggccgcatttgcggcctatgtcattgaaaaagtcatgatccagttgacccgacggtggtctttcttagtctttcaagaagctattttgtatggatatcccctccccttcctagttttgtgggtagacggcagaaaaggacgggaaacgacctccctatgtaaaacctttggtttgatagcgtacaacgtgaatgcgttgataacgtacttcataggcgcagtccctccaacagcactttgtacatcttgcgcttcttgcggtagttttgctgcaagcgggcacgagtatgtccaagtatctgtgccacgcgagggaatatggtcttctctgctgtccaggacaaaacgaagattccgaatgctagcgcaagtagccaggacttgaaaccatcagacatgaaagtcagttgcatcacctccgacacccagttagatggtctaaagagcatatagcccgagaccaagatgttgacgatgatcgtacataagtacggcactaaacgatcatagtcagtatctagatgagcaagaaggggaagttagtggtgtgcttcttaccattctgagtcattggtttccggaatggcggacccgcactcagaacaatgctgatgaagatgtactggaaacaggaaaacaagaacaaagaagtattctctgaattgagaatgttgctcttttctttgtccaattgtggcggcaagaacctgcattgtttgttagaataattttaatgggtatattgtaacggttactgaccatggctgtaattgaacggtctggaaaactgcaaattgcgacagcacaactagcaagatctgcccgagcaaaggtgtcaataccttacgggaaacaagatcagcagttggccgtttccgagacatcgtgggagcaggatcagcccagcccactagaatgaaattagctcgaggactcagattttaggagagagaccactcactgaagaccgcaatgggcataatgagcagaagatcgataaagaggaacttgaggccattagcgatatatcaaaactgttggtaataagcccacttacctggaaatcaccaagatttgaccccgacgtgtacaggaagctgaccgaggagaattgaatggcggaataaagactcatgaacttgaaacaggagaaacttgtcaccagcgcagctcgaccttccctgatcaccgtcggaacacaagagatttcgaacacgcggctagtaaagggtgcggcaacggacgcctcggcgtccgacagtgaaataccaacatctgcggccttcagagcgccacaatcattggcaccatcaccgcaaaagccacagcagtaatcaatagactgaagtttctcaactagttcgtgcttctcgtccggggacatacgggcaaacactttgccgcatacaagtacctatacagtacacattagttcgacgcatggtaaaaaatggtaatggttagtacaacggctgcttaccttgttgagtacatcttcattcccgaagtcaaccaaccatctaaaggcatcacccgtgacagcaacagagtattcacgctcggtgaaaacgtttcctggaattgacatgtcgacctccgcgtcgttgagtggctgcaattccattagctgctaataattggatatagggaaaatatatcttaccaagagtgttcttgggtccaagcggaggtcggagttgtccacgcattcccatatgagagaagctttaggtgcaagaccaggcgctggagatcgttaatactgagctatggcatggattcggtaaacaaaccttcgataaagtgcgggataaagcatagctcatcacgtccaagcatgttgcattcacgagcaacactgatggcagtcaagatgttatcaccggtgcacattacattgcgaatccccgcctcgttcaactcggaaatcacaccggcagtactgggcttcaacttattctcgaatatgatgaagcccaagaattccaggtcagattcggcttccgtccgagacattttttggacttttctccagctcaattttggttcatatttggaagcacaggcaatcacacggtatcccttgtgagtgtagtaattcaggagatcttcataatccgaaggaactgcaaaagaagtatatcagcaatgcaagcttatatagagagcgtagaaagcactgacgagttccaggaatacatatgtccataatgctttctggagcacccttgacaaagaaacttgctccgttgtcgccaaatttcctgacaacgacacttgcgcggcgaagattggagacaaattcgaaactccgcagaactccaagctcgagtgggttctgaatattgttagccatcaagttgtggcttgaatataaatcaactcacatttacatcaccattagtctgtccttgaggaggctttgcaactgacggcgctatagtgtcatatttggggcttgtctggtcagaaatatgatcccctccctcctcaaacgtccagttggtaaattgaaacatcttgacatcgagaggatctcccaacagctcattgtccactaccctaagggaatgacacgtagccatggcgtacatgatcttcctttgctttttgatatcgtattcggagttagcatcgggggaaggacgaagaaacccgtcattcgtctcagagagcaagtctgaaaatctagagattcatcttcagcgccggcttaagggtcatacttaggaacagacaaacctattggcacgggtgactatacgcattcctaggacatccagtccgtcttctgtgagggttcctgttttatcaaaacaaacaatgtccagctttcctcccacgttgaccctgttctcacgtattagcgtcgaagttaagacattattcatcggaggtcactcacttctgtgggctgatacagaatatgttctgtttcttcagtcgtgaaagtgcaaaattggttccgatggtgagtgtggctgggagagctggcggtacaacaatcgtgatcagatcgagggctcgaattatgatcagatgccaagcgagctatatttcgttgcatcagcggccaacataaccttaggaaaatcgtcgttccgagcattaacttacacccaatcgaacaaagttaatgaatgaagcaacgaatccgatgagagcgacaatccccatcacggcgatgtagcggaacgagtctcggtagaacttgaatccagagggtttcggaaaaagcatcgatcgaactagagcccccttggttgtcgaaaagccagttctcatgacaattgccaatgctactgcttcatcgtcatcaacattctggggtcgtctagcccggattactttggttccgctgaagaggaagtgtttagcaacatgggggtggatagaaggggtactgagatcgagatattggatggcgtcatcggtgagtggtgttttagacacagggacggattcacctggtcaagttagatgtatgcatcaatactgagggtttttacgaaccagtgagcatgctctcattcacaatgcagtcacctgacaacaagatacagtcacacgggacctggtgaagcgatgggtcggaaaattcataaacatcaccaggaactagttcttgggaggaaacggaccgccctgtatatacaatcagtttacattcggtgagatgatgcatcgaacaaactcacagaatccacttcttagaacgcgaacatcacactcgaaaagagatatctccctgagccgactcatagtctatagtagcgttagtttcagataatggtcccattcttgggctgaacgcactgatttcgtctctagcacagtcgttgctatgctgaaaaacgatataagaaagatacagacggcgtagtagtagtactcatccatggaccacagaacgagacttgcaatctggaagatataaaaaggatgaaatgcctatacactgtcagatatattgatggaacaactagaaggaaaactgacctcgtcgacgagaagctgaggaattgtctttgcatcaatttcgatgtcgttacttccgaatatctgttccctgctgtctcgttcatcggcatctaatccacttcgcatgactttggcattagtccacgaaggatctttccagccgcttatcaagcaaaatttatcctcgattggatgatagaagaacttcagatatcgatagtcgatgaagtgcagagaggtaatagtcgggtcattatcttcatcgtaggtgtgattcagtgagtcggcgaagaccgtggaaagcggacgtccataaggctggctgccaactttgtggatggtgaattggttccattggtcctaccatgataccatggtcagatggttaatgtatgggattgaagttcacaatcttacctcaatagccacccattggcattttcctaatggggttgccttcccaactaactttacccgccatcgtggcagccatcggaagagaagccaggcaaatccaccggtcaagatgcaaagggcaatatagacagcaaaccctcctgaactcgtggagaacccagcaaagacagccgtcaaatcttccgaggcgagatagactttttgattcaaccgactgccggatcgtcggtctcggccatatgagctggcggacaggtagcgagaaagaagtggatgttcaaccgagtcgcgggaggtagacatccgcttagacacaaaggatcccctgactgactcaacatctgcatccccaatgccgtgtaaagattcttcatcaagctcgctttgctcgtccactgcagattcgttcgacaattctgcgaagtcttccccgtcctggaagtatgtaaagctcaccgtagagcctgctcggttacggcggtgcgcgaacgaggcgacgcttgaagggatgctttccgagatcgggccatcgaagacctagtgcgagtcagatcctgcgctgaagtctgcacgtgagaatggagatttgacatacctcattacgggccatctccacatccgacacggcgctcacactagagaagtatcagcagggattgaagggttgatttgggtaggaagggagcatagcaacctgcttcgcatggaatcgcgtcgcattctgtttcgaggcatagataggtccacaggaccagtccccgagggagagtgcggacggggcatgtttaagaggtcaactcggccgattcacaaagccaatagccttgcagagtgtcgtattatggggctttcgtaaagtcgtatttcaccgacactggaccgaaggaaaacatttatcgtagagcgcgagttcgcacaaaagcagggtgtgatctggagcttatcggcgtcccacagcggagagcgacttatctccatgtgactgtccgatagctttggcttactaattatatcggaccaaactttgaaatcccccatgcagggcatccatataaagttgtatacgataacggcttctatatgccattgtgtatattgacaaggttcgataacaatctagaagaacggatgagtcttggcatcttatgtctggactttaacggacatctcattggccactgaatcatcgacggggttttgatctggaatgatacaggaggatctacatagccctgctcaaggctccgaagtatttcaatccttgtgtatttacccaaatgacaaaaagtacctttgtacatcatcctacgcgagtcttgaacgtcatcgaatttcatgtagcctaggcaaaacaagcaacttgtccacgggtgtaaaatacccgtttctataaatatatatcgcctattcatgggggcgaatctcgtcctagacctattttcttaccaagcaatccaaaaaaaccacatatagcaggcgaatgggccaagaatcacagtcagatagaaataattcccagttccatagccatatttggaattggagagaggggtaatggtccaggacgccaccgggagcgatcagatcgaagatgatcacagaagacaagatatcaagactccttgacatggaaacgacaagatagaaggaataagaaagataaaataaagctgtgtccagcgtaacaaggcgcgacaaatcaaaagcgtatcaaaaaggtattgttgggagaatttgcagtctttgcaggctcaaccagaaccgtcccgccaagcccctcggccacagggcgctaaggatcccaccatcttccagactctcttcccccaaaactgaacgggtatcaaattcttccttctttctctctcctcacctcattccctctccctgccccttttcattccccgttcatcatgtctgagcccatcagaaataagaaggcggacttcccggtcgcaccgtaagcatcccccctcctcccgtttttttttcccacccttatcaaaagcaaaaaaaaaaaacatggatgctgacttgcagaaggaccccgcaaaacacgccggccaacaatgctcctatctcatctcacgcccagcagcctggtgtatccagcatcgaggagggtaagtcatctcttttctcgtattcaccgacatttctttgaccgtgctttctgttctagaaacctttgacaaagctacggctgcctcgctctttgctcgcaaccctgctttggtatccatgatccaaggcaagttgggtcaactcgtcggccgctcgtcaggctacatcgaatctctccccccctccgtccgccgccgtgtcgctggattgaagggtatccagaaggagcactccaagctcgaggcccagttccaagaggaggttctggaacttgagaagaagtacttcggcaagttcacgcccctgtaccagcgtcgttctactattatcaacggcggcatcgagccgaccgaggccgaggttgaggccggaaaggaggacgaggagagtgatgaggaggagactaaggaggagcccaagaaggaggagggcgaggccgcgaagggcatccccgaattctggctttctgccatgaagaaccaaatctcgctggctgagatgatcaccgagcgcgatgaggaggctctcaagcacctcaccgacattcgcatggagtaccttgaccgacccggattccgcctcattttcgagttctctgagaacgagttcttcaccaacaaaactatctccaagtcatacttctacaaggatgagagtggatacggtggcgatttcatttacgaccacgccgatggatcccagattgactggaaggaggaccaagacctgaccctccgcctggagagcaagaagcagcgcaacaagagtaagtccactcgaatattgagatgccatgttgaaactgacagctgacgctcctttagacaccaagcagacccgcgttgttaagatcagtgtgcctaccgagtccttcttcaacttcttctcacccccacagccacctgccgaggatgacgattcagtcgccagcgacattgaagagcgtctggagcttgattatcagctcggtgaggatattaaggagaagctcattccccgtgccattgactggttcaccggtgaagctctccagttcgaggagctcggtgaggatctggagggtgatgagtttgaggatgacgatgacgaggatgaggatgaagatgaggacgaggaggagctcgggtcagaccgtgaagtggacgaggaggacacagacgaagaggtatggcataccacactcaccgactcagatcacttgctaacttcgttccaggatggtacttccaagcccaagaaggaggccgccgagtgcaagcaaaactaaaccaaaaaaaagttgccggtggagaatgcccaacgtgagattactcgtactctctgatattttgctttgctttctgcctttttgtgcccccctgcgttgacctctctatcttctaatactcaatcaatacttgacataatcggtgtgtaattctcagttccggcgctgtaaggatttggacccatagctgagacccctggactgtcttataaaaggatagtctacgggtatgtggctattctggtatgtatgtatacttgatatccaataatcaggaggcaataccagagacgatacctacatgtaggtattaaacaagcctcaggtacaatacgactttctccttcataagtaatagtagcataactacggagtacatgtagtaaataggagtataatgtacatactagtacgtaaacataaggtacagtgtagaccaagtaggatggcggtgacaggctgtggggtgtgccgcccccccagtatattccctaagctccttcaggggctctcgctaaatggccagctgttagtctcactcaagggttttctttttcacctccatctaattcttatctccaatctttttattctattcttttgaaatatgagatgaggggttgagaaatccccctgtctttggactacctgtatcgccttgaaccttcgatgccctacctccgaaaacacccatcatccccggagcttctgcaaatatcccgcttttattgcatcaaaaacgattaacgacctacattccatatggcgcacacctatgaggtcggcacgcgggcctggcagcccgacccgacagaaggatggctggcatccgaggtgaaggagaagctggaggatggagagaaagtgcagctaatctttgagttggaaaacggagaggtaggtgcccttggaatactggacgcgggctgcgcagtcctgtctcttgagttttccggggttgctgacactgtcttgatcggggcagacaaaaacgttggagaccacgcaggccgagctgaagatcgataacaaccccaaactacctccgctcatgaaccctgctatgcttgaagcaagcgaagatctgacgaatttgtctcacctgaacgagcccgctggttagtcttgctcctacgtgtccagtgccaccctcattgctgacggccctttgaagtcctccaggctataaaactccgctatgctcagaaggagatatatacctacagtggtatcgttttgatcgcaaccaacccctttgcccgagtcgattcgttgtacgtgccgcagatggtgcaggtttatgctgggaaacaacgtgcctcgcaggcgcctcacctgttcgcgattgcggaggaagctttctcgtaagaatcgtccagctgttacatctctgaacttgatttcgcttacacttttgatacagtgacatgcttcgcgatggaaagaatcagacgattgtggtttctggtgaatccggagcgggtaagaccgtgagtgccaaatatatcatgcgctactttgcgactcgcgagtctcccgatcagcctggaaaatataccagcagccgcgcagatgcaatcagtgaaaccgaagagcagatcctagctactaacccggtcatggaagcgttcggtaacgccaaaaccactcgtaacgacaactcctcccgtttcggcaaatatatcgagatcatgttcgatgaccgaacgaacatcatcggagctaagatccggacctatcttcttgagcggtcaagactcgtcttccagcctctcaaagagcgcaattaccacatcttctaccagctggtagcgggtgcttctgacgcggagaaacaggatctgggtctcctggctgctgaagactttgagtatctcaaccaaggtggtactccagtaatcgacggtgttgatgacaaggccgaattcgaagcgactaggaagtcgctggctgtgattggtgtgccgcaggaagaccagacaggcatcttccgcgttctcgctgctttgctacacctcggcaatgtcaagatcacagctactcgcacggattcgtcagtttcgtcgaccgagcctgcacttatccgcgcgtgtgagatgcttggaatcgatgctacggagtttgcgaagtggatcgtgaagaagcaacttatcacgcgtggtgagaaaatcacctccaacttgacacaacaacaggccttggttgtccgagactccgtcgccaagtttatctattccagtctatttgattggctagtggagaagatcaaccgccgcctcgctactgatgaagtgcttgagcagttcaaatgcttcattggtgttcttgatatttacgggttcgaacatttcgccaagaactctttcgaacaattttgcatcaattatgccaacgagaagttgcaacaagaattcaaccagcatgtgttcaagcttgagcaggaagaatatgtccgagaagagatcgattggacattcattgacttttcggataaccaaccttgtatcgatcttattgaagcgaagctcggtgtcttggccctattggatgaagagtctcgacttcccatgggctcggatgagcagtttgtcatgaagcttcaccatcactttgccgctgacaagcaaaagttctacaagaaacctcgcttcgggaaatctgcattcaccgtctgtcactatgcagtcgatgttacttatgaatctgatggatttatcgagaagaaccgtgacactgtgccagacgagcatttggaagtgttgcgcaattcttccaatcctttcattaaggagattctagaaactgctgcggccgttcgtgagaaggactctgctgctatgtcatctaagccagttgcagcagctccagggcgtcggattggcgttgcggtcaatcgcaaacctacgcttggaggaatcttcaagtcttcgctgattgaattgatgcacaccatcaacaacacagaagttcattacatccgttgcatcaaacccaatgaggcaaaggaatcttggaaattcgaaggtcctatggttctcagtcagctgagagcttgtggtgtcctggaaactgtcagaatcagtactgctggctacccgacacgatggacttatgaggaatttgcggtccgttactacatgttgtgctattcctcgcaatggacctcggagattcgggatatgtgtcatgcaatccttcgaaaggccctgggagatgagaagcaagataagtatcaacttggtcttactaaaatcttcttccgagctggtatgcttgcattcctggagaacctccgaacgtccaggttgaacgaatgcgccattatgattcagaagaacttgcgtgccaagtattaccgccgccgctacctcgatgctcgtgactcaattctcaccactcaggccttcattcgaggtttcttggcacggcagcaggcccatgagattcgccggaccaaggctgctactaccatccagcgggtctggcgtggccagaaggagaagaagcggtacaatcaaatccgcaaaaacttcattctcttcgagtctattgccaagggattcctgtgccgacgcaacatcatggactctattaatggaaatgcggctaaggtcattcagcgtgctttccgctcctgggttcaaattcgagcctggagacagtatcgccgccatgttatcattatccaaaacctctggagaggaaaacaggcaagaaactcctacaagagacttcgtgaggatgcccgtgatcttaagcagatttcttacaagttggagaataaggtggttgagttgacccagtacttgcaatctcttaagcttgaaaataaaaccttggtttcacagctggaaaactacgatgcccaattgaagtcatggagaacccgacacaatgccttagatgctcgcacgaaggagctccaggttgaagcaaaccaggctggtatcaccgcggcccggttagaggcgattgaagaggagatgaaaaagcttcaacaaagccacactgaggctctggctaccatcaagcgcctccaagaagaggagaggatatcccgtgacgctcttacagtcgctgatggcgagttggggcgcctcaggctattggattctgaccatgagaaggataagactggtctccggcagcggatttccgatcttgaggaacagctcgagactgcgaagagatctgtgcctttgcacggcatgaacggcgatggtctatccaacggtggcgcagtcttgagcactgccccgggcttgatcaacctggtatcttcaaagaaacctaagcccaagagacgcagtgtcggtgccgagaggatcgagacggatcgcttcagtggtgcatacaaccctcggcctgtttcgatggcggtcacccctggatctatgatgtcccgtcaaaatgcagccatctctcctggtctagagtcggtcgagatggaactcgagaacctactttccgaagaggaagaattgaacgaggaagtcgccatgggtcttatccgcaacctgaagattccgctcccaacttcgacaccgcctccaactgaaaaggaagtcttgttcccagcatacttgattaaccttgttacgtcggagatgtggaacaacggatttgttaaggagtcggagcgattcttggccaacgttatgcagtctatccagcatgaagttatgcagcatgatggggacgacgcgatcaaccccggtgccttctggttatccaacgtgcacgaaatgctatcatttgtcttcctggccgaggattggtatgaagcacagaagaccgagaactacgagtatgaccgcctgttggagattgtcaagcatgaccttgagagcttggaattcaacatctatcacacttggatgaaggtcttgaagaaaaagctgtacaagatgatcgttccagccatcatcgagtctcaatcacttcccggctttgtcaccagtgaaacgaatcgtttccttgggaagcttctgccctccaacaataacccagcctacagcatggacaacctcctcagtctattgaacggtgtttacaaggcaatgaaggccttctaccttgaggacgccatcgtccttcagaccgtcacggagctcttgcgcttagttggtgtcactgctttcaacgatctcctcatgcgacgtaacttcctgtcatggaagcgtggtctgcaaatcaactacaacatcactcgtattgaggagtggtgtaagagtcatgatatgccggaggggacgttgaaactggagcatttgatggtaagatttcttgtttgatatttatttgggtattatactaacacctacatagcaagcgaccaagcttctgcagttgaagaaggctactctgaatgatattgagatcattcaagacatttgctggatgtaagtggacccaagtatcatctcccacgaattcacatgactaattttgtgcaggctgtctccaaaccaaatccagaaacttttgaaccagtacctggtggcagattacgaacagcccatcaacggcgagatcatgaaggccgtcgcttctcgcgtcacagagaagagcgatgtgctcctcctggctccggtagacatggaggacagtggcccgtacgagatcgccgagccgcgtgttatcactgccctggagacttatactccatcctggctacaaacaccgcggttgaaacgacttgctgagattgtgtccgcgcaagcgatggcacagcaagagaagctcgaatgggaccatgggatggttgaggaatagatctgtactgttgtatattagacttatggatttcctgtgagctacggattacgacttgcctggattatccatggcctttgcgatacagtgttgcgcgtgattttcgtttgtttcaattgcatatgacatcttggcttatagaccagaagaggttgctaagagaattcctgtaatgagttttctccttctaaaacatagacgacaatccaaatacaaaaaatggaatgcccgaagggtttattgtcccgagtagagcaattgatatgtaagttttttttattttttttatttcatgaattttgaacatatactatggattagttctcaccccctatcgtcggagtgctacaatgactaccccaagatggagaaaaagaaaataagaaacgaaaccaaagaaaggaaccttaagagatatatatctgagtagtccttagatcgggtcaggtgatcccaacatgtatgaatcccagcaccgtcaatatatgcaatcagcgatagcacagtggggcacactattatctgcgacttgcaacatccaacccataccatcacctaccaatctaaaatccatacacagtcaaaatggccatcaccacgctgaacttcatcaccggcaacaaaaacaagctcgccgaggtgcaggctatcctcggtaaggtcatcgaggtgaacaaccaggaggtcgatgtccccgagatccaaggcacaatcgaagaaatcgccaaagagaaggccagacgcgccgccgaagtggtaatttcttcctagacttttcatgctgaaattgcatttgcttacgagggaatagatcaatggacctgccttgaccgaagacactgccctggagttccatgcgctcaagggtcttcctgggccatacatgtatgtcttagctatattaaggcttacttactatgtgataatagtactgatgattgccagcaaatctttcatggagaatctgggccacgagggcttgaacaagatgctcgacggcttcgaggacagaactgccgaagctgtgtgtacctttgccttttgccagggccctggcgcagagccgattattttccagggaaggactgaggtgaggcaaatacagtcatttcaaatttgaatatatctaattgtgattgatgtacagggtactattgtgcggcccagaggcccagcaaaattcggtaagtgaacatccaactgaggtctgcagagaatcaaaatcaagatctgatatatgacaggctgggatgctatcttcgaatataatggcaagacatatgccgagatggacaaagacgaaaaggtaagaacggtcttgttttcccgtgaaaaaaagccatgtactaagagccctgcgaacagaacaaggtctcgcaccggtacaaggcgctggtgaagttgcagcactggctagccgaccaacagtaaatgggtatagaactcggcctgcagaagaccatagaagaatgtgaaacgaagatcaagaattgtatatggcctggcgcattccctcaatccgcattctgcgcatgcgattgcttccacgaatcgacccattgcgcgatccgctggcagttcgagtctacgtctgcatcctgctcgctgttcaactcgaccacgatctcttcgtcgaatgcctcccgcgcttcgtctgataggacgccgaagatttccgcgtcgacgttctcttctagctttttctcatggtagccccttggaataggttagtttgacggcgtagatatgttgcgaggttgattgtcataccgggaggaaagtcggtcgtaaagaacatctgtagtggggcagcggaggacaaccacgagatcgatccaggacttagggaagaggtcacaggcatgccagtcgatcaagtaaccgccatcaggaatctcatcttcgagggcatcgaggagctacatcgcgcatggattagcatgtgaattgttgagtcttgaaccaatggtgggaagaggagctttcagtttaagagaagagcttgtaggaaccattctcaccttatcctcgtcaacaacccaggtcttcaattcctcgtcgtattcatcgaagcatccacggtcctttgcgacctgattaatggataggtgcttcaagccgatctcttgcgcgagttgttcgcagtggacggtcttccccacgccgggggtgccggtgatgatcacatttggagaggtgcgcatagtttcttaaaggatagagatcttgaagtggaattgtagattgtagattgaaaatggtttccccagatgaaataattccatcggactaattttcctcccggctatcttatcgtggaggggtaaggtactgcatttggaatgtataaaagacatttatagaaacttgtaactatgtgttctttatttgactaacacgatacaaatgatatgcattgttaatggaatcgtttgattttatgcggcttcatgttccgggctggttgtacatagcctagtaccaattagcattagaacgatgagaattgaacaatcactcacttgagaagctcgaatatcttgtacttttgcagataaggcgttcctctgcgatatgctttaagtagacgagttggatctgagggcttgacaaacgtcccgagcaagcgctgcattgcaggagaagtcttgaacatgggatcgaataccagcagatttgcgctgccgttgtctcggatttcaaaacctacaattgtcatagaatgacctagctcaagttagattgaggtatataggtttgaaagttacagaaagttgtaccttgatgctggaagtatatcggagggagatcagtctgaacgatcttcgcatcgtcgtctggtgagcacgctgatcggaaatattcggcgacatcaatgtaaagagcctcataggcccgaacgttgcctgattctgacagactccgggcttcacatctagatatagggtcagcgggatcgaatcgaagcaggctagataactcacgggattcctagactcatgaaaagcgcttgtgcctaggtactcgttaggtatagcagataatcaatacggagaaaagacctacttcaggcgtaccaataaacttgcgcgtatttttgataccccctgtctcagctcttccagagctattgaaccccatatcccaggccgactcaatcatatcctgcaactcaaggatcgttggtcccttatttggaaagtgctcatagccaaagctacgagacttctgcagccaagaaaccagcatttgaatattgcgatagccacaaaacccgccttcccgacgcatcttgcagatatggcggactttggggctacagaataatgcccgctggacagatttgtcctgttcacacagccgagcaagaacaggaattaagttgtcggtctcattttctactgtctcgcgccgtgtgagtttgccatcggacgtgatttgggtttgctttgatgtgctgccgcccttctccagcattttccttagccatgagggcattttcttctcgtgggcatgcggacccaattccgagcgctggatagtgttagtacttatcttcagagatgcaaatctgggacgaatacccctaatctcttcgtcccgttggcattggttgcccttgggggactgtgaggccgtggtgtcttggcagtgtttactcgcgaggagtctcgttgcatcccacgcttgcctcctttgtgggagttcagcatgtcgagtgaatcttcatcatcaaagtacccatcgccatgtacgtctgtagttgggcgtgccggtgtgcccccagtatcatccatgccctccgcaacatgcagatccaggtgactggagagctcggcaatttctattgtctcgccacatccatgtggacagtcgacatatttgtctgcgccaccctggctcactggcagtgaagctgagttttggccagcaagatcctgcgggttatcctgtatggaactagctagccctgtttctggatggcagtattcgatgtgttgggacacaaaattagcatcggagtctgcgaaagtgcaaaaggggcatgaggcggtgttgttgtcggccatggaattttcgtccagtgctgacattggaggggaaattgttaggttgatgctgcagacaccaagatgagtagcaggtgtatatgtacaaaacgcagagagagaaaaagaatgccaaagttgattacacgaagagccagaagtatagacaaaggatttaatttgatgcctaaatggccagacagcccgttcgccgagacccactaggcggagttgtcagttcatgcggcgtacacatgcgcaacacacaacatacaacatacaatctggattatctttcattccatatattaatgaaccttggaagagatatcattattggtctcttgcttgtcctctttctgatccggttttcttcccagccctagccgaactggtccagctcgcctttgagaagtgcttcccttcatgacagccgtgggcattgaacttctttggcctttttctggcctcttttcataggagccatgtggtcatgaatatctgggattgacagatttcccatcattccacgatgccaaggaaggcgaacactctagagaccagactataaagtctctctctgcaagatattcagtcttcttttcgggcgacgaccaatggggctgctggagcctccggatggcacgaggaatcgtgaattgctcagggattctattctggaaggtgagaatccgaaattctccagtcacctacaggctccgcggtctcaaactcttcagcttggccattagcgcctctcgcttgctgttaaactgcccggagcgcagatttcctcaagctggaattccaacaaactgagtgcgtagctcaagctcctggatttgaatatggacctttggccacttggtgcacgtggcctccttcctatagtggccatgaggtatcgactagatctgagcaatatgctgatagctattctcaatgtagggaaagagattaagaaatcttactctccgcgtggctctctgggttcaaataaccagaatctgcccccaaggtagatgaagtaaataatcggaaaaaacggcaacgatctttgacaaatcgtgaatcatctaggtatggggctactttggctcttctctccataagatgtatggcaatgtccatacagatagctattgcggctattttctgtgactataaaattgtatacaggaggatcaacatgcccactcgatgtttctggcatgttccgaaaagtcgcaatcatttctatcgtgacgtgacggcttgggtcaccgcgcagcagaatcatcataatatcaacaaggacaactgaatctcaagcatggtccattcaagtatatcactgtactagtactagaaatcaattgtcgagtcctgatatatactccggaagaacattcaccccgccaagacccaatgaggtacatttcatatgaaaatggcgtgattggtggggcctccgacatcgttggttcctggccgcaacaggcaggcggtctctctctgcataactctatttccaattgagtcacaaaaaaaaaaatatgcaacccgaagtggctcctagggtctccgctttcgccggttccccctccaaaaccacttctcactcccttgcattacattgtacactgtctttacttattttgggtcgacactatggataccaccattcttaattcgaatttgccagtgaacacgcaggcccatagcaattgggtcgtgcagaaattcggcggcacgagtgtcggcaagtttgcgcgcaatatcattgagcaggtggtacagtatgacgcactttttcgatttcgacttgacggagactgacaattgtatagaccgagtctcgtgaacaacagagtcgccgtcgtatgttccgcgagaagcagttccacaaaagccgaaggcacaaccaaccggtgagtcactactccgcagccatatgacgcttgaggtattgagatactaacaccaatttcttccaaccaggctattgcgggcagcgcgggacgctgaaaatcctcgttcaaggcaatatctgacattggtggaggctgttcgtttggaacatgtacaagtcgcccaggaacaattgaaatcggtagaaataagggatcaagtgattgcggatattaccggagaatgcgaacgagtactcaagttcctggaggccgctcaaaccctgggagaaatcagtgcgcgctgtgtggacaaggtgatgagtaccggcgagaagctgagctgtctgctcatggccgcccaattacaagaccgcggggttgattcgcagtatgtggatcttgcagaagtcattgatttccccatcggtccccacggcttggaccaggacttttataataccctggcggcagctttcggcagcaaagtcgcggcctgcgggcatcgagtacctgtgatgactgggtactttggtaccatccccggtggtctgctcgatcagattggtcgtggatataccgatctctgtgccgcccttgtcgcggtcggaactcgcgcccaagagctgcaggtctggaaggaggtagatggtatctttaccgcggacccgcgtaaagtgccaacggctcatctgctcccgaccattacccccgccgaagccgccgaattgacgttttatggatccgaagttattcatccgttcaccatggagcaagtcattcgcgcacggatccctattcgcattaaaaacgtcatgaacccaaagaacgcaggcactattattttccccgactctgtggccgaactagagagaaccacacccggacatgatccacgtttgttccggacccggagtccaactctcgcgcatacaccgaaacgtccgaccgcagtcacaatcaagcatgatatcctggtgatcaacgtacattccaacaagcggtcgctctcgcatggtttctttgccggcattttctccgtattggacaagtggcgcctatccattgatttgatctcgaccagcgaggttcacgtgtccttggcccttcactcagagttgccccttttgaatggaaacggacgggatgagtatcagatcatcgacgaggatctccagggtgcattgaacgacctggagaagtacggaactgtggatatcatccccgagatggccattctcagtctggtaggcaagcaaatgaagaatatgattggggtcgcaggccgtatgttcaccactctcggggataacagcgtgaatatcgagatgatttcgcaaggtgagtaaataatgatccccactcccccgcccccctcgctctgcctttgtacccttgactggggctaactggatcttttctccccctcgcaggtgcaagtgaaatcaatatctcctgcgtcattgaagaacgagacgccgaccgcgccctgaatatcatccatacgagcatgttcaccttcctggactaagcgtcccacgtttgcgcatcgagcaaaaagtcattgttttaagatatcccttgggttttattgatagaaaaaagttatgcatccacccgaagtcgaagttccccgtgaatataggaggacacgacttttgttgggaaaaccaagcatgggctttctttttttgtgatgcatgggcttggagttttctgctttcattttccccggttctttttttttcgtctagaatagaagtcatgaagcgattgttccatgagggatgattttctctatattttgggatattcaatcacacacatcttatatatcagatttcttcttcttggtccctttccactgtagcctcctcctttctgcgccctgaatagaacggagtacaacgtactctgtaccccctgatccgacagtgaaaggaccatcggtgatgattctagctggagccaggcgtttaatgtgtctctgtcgcttcgcttgagtcggagtctgttagctctagggttactgtcgggttgtccacgaagccctgtcgcactggctaacctctttagttttacatctccttccttgtcacaacccttttcttccctgacagctcctgggtatttgtagcggggtggatacgacctatttggttaaaagcgaggtccattgagtccctgaattctccaatggcttggaatggacgagtgttagcatcatggcgaaagatccgaggaccctcataagaaggcaaacaggagagcctgggtaaagggattatggttcgtccagcaacccagtacagagtgagtaagtgcatgaaatctgttacaaggtgtctctgatatacaagcaagggcatagggaaatacactagggacctcctagattcgaacaatagaccccgttctagttccaattcattgctctgtcctcgtactccatactctgtgtaggtttggattattaggttccggcacctgcagacaagagtgcagcacatgcgttgtacgatgcagcctggaagattgattggccctcgacgcacccgagagcaattggccactagtcaagggcgttaggagatccatgacagcagataaacaaggggtgaaaggtagcgagcgtttcagagttacatcaacacttccacataccgggaggcccggaccaattggggtgccaatgctggattgacagtgtctcggtctagattggtggtgtgatactacgtgtacttgtagggctagatgtatgccggagtacggagtacactccgtatattctgtatattgtagacagcgtattgacaagagctaaagatagatatactgtacactatatgcttccaatatactactatacaacatatactattcaataatccaagcaataatgcaaacctgacatacttccgttcatcctcggtggatcagatcggcgctagaaaatgtgagcaagggaggggaccccctttggtaagatatgaattgataatacgaatgataccatcccgatatgccccacctcccatagtaaaacgcgtgacgcgtcgagataatgacaatacgtgactggtatcatcgcactatcgcactccatgatctccctctcctcctcctcccccccgcctttcttcttcgctgaaggaaaaattgaacatttctagaattctataataatgatttagtatcttccaagggtgaacaaggaaactgagagaaattctgaacgatatctcttacttgtcacagaaccccattctttcctctcaaggaaacccggcttactcttccaagtcttactctactcatttttcctgtacttccctgtattcttctcttctctatcctctctatcctctatcctcagcgtcagcagtccgtaccatatctggatattggttatctcatctcaaatcacacatctcatccattttcatcggttatcagtggcttgattcgtgccccggaagtgtgacgccttagcgccttgtggcccaacttgtttaagctgcatgacggcctgaggttattggcttcctcgatctacggagtaccattggtccaattggaattctctgcacagtctcgtcacacctagacacggctcgctcgttgtcgcaaactgggccgggggccttgttttcaacagtcgcgctctcccccaactctgtttacgcgtcatatggtccctctggtgattggtgatattgcaacttggtgccctatcatttaggttatgggatcgacgcgttctacgggcgcacactattcctcagtgctagccccatcagcccaggagatcatcagatcgcagccccgtcttcaaccctcaccgctaccactccaacccattcagaactcatcttcctatccgccttcgggtccccacaggccctcgccgacaaaaggagtccatccccagggctcgcactcgcgccacggaaaactcggtttcattcccatatctgctcctactccccccatgtttaccaccgattccccagccaaaaaagcgccgttccccatctactctacaacctctatgccacattctgccctcttcaccacattctccagcgtcaatcctgaatcatcaaaagaaaacctgtcagaagagccatccaatgacagtttcgcggacttcccagagccgtcgtatgaatctaaacttccaatgaagcgcacactcatggaggctgcacctctcaaggagcgatccaacaagaaacacaagcgtggcgaaacgccggctgcttatctacccgaaccccacgacatgccaccagtcgaggatgatggcaccaagcctccatacagctatgctaccttgattggaatgtcaattctgcgcgccaataaccggcgcctgacgctagcgcaaatttataagtggatctccgataccttcacatactacaagaacagcgaccccggttggcagaatagcatccgacacaatctcagtctcaacaaggcattcattaagcaagagcgacccaaggatgaccctggtaagggtaattactgggccattgagcccggcatggaagcccaatttcttaaagacaaacaagtgcgccgtgccacaatgtctagccttcctcttcctgctgctcctcagagagattctatacctcagtcgcaaaccgcaagcaccacaacatggatggtaccgccacagcccgcttatcacgcgccacatcatcacgtgcctgcccccagaccggctccagatgacttgtcttcagatgcaacattacctgcgtctgaccctgctcttcaggatgatgcagacgaagttgttcctgctcctccggtccgcgcaccacctcgttcctcccctccgcagaccattcggtcatctcctccaatcgctcctccccgattcgcccgtcagggtacccctccaacccccactcactctggccctacccccgcgcctcgcccgcgcaagcgcaagtcaatcactataaatgacagtggttatttctcgtcgttggagtcatccgctctcaggcctaacaaggctgggcatatcttgacatctgatttggatatcgagcctccacgcatcaagcgcggccgtgctgaggaagagatcgcgcgcatgcgcagctcatctcacgatatcagccctggtcaaccagtggtccgcaaaaaccccaaccccccgatcggttcttcgcctcttcgcagtcagtatgtgagcatgcagccgcctccattgacgcctatcatcaagttcaagaagcctgccaggccgccaccatctgtctctcccaataccaatctgcgaaaccatcgccggaagatccagcaaatggtcaactcgcctatcaaacatttgggcctttctgaagatgcccttccttggagcccggctttcaatcttcaggacgagacctatactcctcatgatcatttccatacctctttcgatgtttttgcggatcctggatcagcacaggtatcctatgggtctcccgagaagcgctcactcaaacgcccgcggaacgacagtggtaccactgttcttggggacatcacctcggtaaatatcaatacccgtttgggtatgccctcgttgtcgcgctccaagtccgcaattttccccgagtcgccatctaagcttccagacccgagccgctttggagacgctggccaggaagatttcttctcattccatctctttgatgagagcaatgacagccccggtgaagtcgatggtgttgatctcttgcagggcttccaaaagattggaggcgtgagcaaggacgacactctgaagcccagggcgcttcatcgaccacaattgggtcaccgccccaatacgactttgttttaaggcgctcttaagttcataatttgtactttctttttttgtttacaggtcgagatctctgcgagacgcaccttgttcgatttgccttttattgttgattcttgcatcattctcctcactgtccctttattgccctcctgcttttgtcgccccgcaacctttgtttcttgaattttggattgtacctggagttggttctcaacgatgtttccaaggtcctgtgggcgggtgttttatttgggagtttttgggctgcgctgatggagccggttctgacatttcctccactgagcccgggatggcctggttatgacattaatgacgatgctaagatgtacatgcaagcgatggtttttatgatttggatatcagggtcggggctatctttatgggaaactactggaatacgcattgaaggcgttcttgatataatgtatgtagttagcaattgaaagtcgttatttgtctgcttatcaaactgtttcatgagccatccaagccgagggtatatgattgacccgatgaatggatccaatagagtaattaaagaagaattaaacatagaaacagaaatgcatagtaccgaaacgcccaatccaatggatgcgtgtagtggacaacctcaatccaccactacctcccgaggtccccagccaaattgaagccctccagtcatcgaccaaccccagcctcctttttaatcgctgcttccacagccgttgcagccacagctgacacactgaatcgtctgatcctccttgagctgagccttgggcactcgacagatacacgtggaattgaaattagtctctttcgtttggacacagcgcagacaacacagctaggggaatcagttagtttagtccacttcctgaataaaagtccctcgaatcgcaaactactcaccttctcgtagccctgttttttccacttggcaatcaagttggcatcggcatacttgttcttgagcaggaaatcgtatagttcctttgagatcgcttctttctcgtagtaaagttcatagatgtatcgtgagcctaataagaggggtagcagcaagtcagcgaaaccgtacttaatttctcgatgtcgcggagaggagtaactcgtacgttgatgactgatctggaatatgggccagaggacctcatatttcttctttccttcatgcgatgcgttttccgcatccttcattttgttgctgaattccagcagtgtgtcttcgagatcgtcgaagccagcgggaggcggtttgcgattgcgggcagtgcgaatcggaggcatggcgggcgatatattacagatgagacgaggatgatgagacaaatgtgatgcggatattccaagcgatcgtatttcgatctaacagtgtgtcgacagggtgctttttttcctcttaaatgagaactttgaaacgaaggacgtaagttgctatcgatagggaaaactgcgcgtcatttttgtgccacaccccaccgcctttgattttgaattgcggacatccgtccagctaccgtccagctgttatttcccattgcccgtatcccattccacttcaattgctactcgcatctcatatacaataccgtcattatggaacaacagctcgatctcaccaagctcaccgacagcgacaagaaggagctcaaccaggtcctgaccaacgaggctcagaagtccaacattcagcagagtgagttgtccatctccatctttctatccggacgtataagagatctatacttgatgatttctataccctggattttgagtcgagtctagcgcttaatatattccacctggaatcaaacccatagctaatatcaatccctttctagctgtccaccacctgaacgaagtgtgctgggaaaagtgcatcaccagcaagatcacctccggcaccctcgataagtctgaggagtcatgcgcacagaactgcgttgaccggtggatggataccagtctggctatcctctcgaagctggacaacatgcgcggcggccccggccactaagcgtttacctgtgtgttctcggtttctgctatgatcgctgtctggatggatgcatgtctatggatgccaatcactcttatgaagattggttaggttggagcctgtcatgctctgtttttttgcttcgatggcggttggatgggtttttctttaggggtttatggatggatagacggattgtggaaccatcacttgtatactagagtgtcgatttatgaactaaaccatgttgtcttgtacaatatatgtcggatttgtggggatgttgtaagtagaaaagtgtatcatcgacgctaccatctccctagactataggaagagttgtgagaaaatgcaatatagactaggttacatatgttgaagaatcataacatgtggactgggtatgacttgcaaataatggaaccggtttaactgcaaaggtccaaccttgtaaaaagcaaatgtataagattggcaaagttggctcttggctcttgtctcgatgcactacaagaccattaggccatatacgctacacaaatctacaacagtatactacaacgtggtctggaacatgtcttagccattacaggaccgacaagtccggcgattcttttggaatcgtgcatttcactttcacaagttatgttctttttgatcattcagcccggctggtattttagcatcaccgcagtgtaaaacaaagttcgccaaaaccctaagaaatccttttcgagcattccccgcttagacaatggccaacttggtggcagcaatgtcaagagcatcgacatcgggggtaagacgggcgaaggccttcttggttccgtcagggctaaagattatatgttagttttgattcatatatatcaacagaaaggtagaacataccggataagagtgttgatcttgacggtgtcaacatcatacagcttcttaagagcctgcttaatctggcgcttgttggacttgacgttgacgatgaagacgagggtgttgttctcctcgatcttcttcatggcgctctcagtgttcaaggggtacagaacaatcttgttgaagtccagagcggggccgtggttgacggacacgcgggggtacttgggggaccgcgacagctggagagtcttggggcggtggaagctggccgaggtgcggaccttgcgggacttgtgaagctgttgccacaaccgcgttagcgataggctccaaaaggatttctttggtctgcttcatcttttgctacgtaccgaagcgcccttggcaaccgccttggcggcggcgttggccttgttcttgcctgtagagaatatttcgttagcgaagtggactaaaaaaaaattcccaaaagttcgtccgtggattgctatttgtgaatttgccggtgtggttgcagtaggtcgaggattctgaagcggagtcgcagatgctaagatcggtaggcatattgtgatgcagatttgttctgcgatatgccctggcgtctctggctctttgcgaggtgatctccaaatatcgaacttttttgaatccgaatatcttcctccacgtgcacacggcgaattcacaattggcaaggcggcgatcgcaataggaagagcgcatagttattggaacataccggtcttgttgtcggagggggccatggctgtcgtcggtcgctgtcgatgatggattatcgcagtgtcaaaagtcgaacggatttggagtggtcttcgcttagcgaaaaccctagtgctgtgtgtgggtcaggtgacctgcagcccgctgggtctggtatttttggtatttttcagtcacagtcgtacagtacggttacttttccgtccaatcagaattgacatcgtatttggctcattttcttgaacagcttttcttcacatgccagtgacctcctctgctttttgtatatttgtccctcaaagagatctgaagaaccaaagtattcttgatatcttaatctattatcctaattttctgactcctcgcgatcattaaagcatggctccccaaaaacgatccaagaggccgctgttgttgtcgcatagtcggcctcgcatcgtaaaatccaaggacgctgctctttcagccaaggctacccgcactctaatccgatctcatcatcggcttctcaaagtccgggctcaagctctagccgccggggacgaagcccgagtgagcagcatcgacgctcaaatccaagctaatggcggtctggaaagttatcagatcgccagtaagctaggccagtcgatggaccgcggtggagattcgagcaaagtgctcatcgactggatcaagccgcaactcaagcaatggaacaaagacattccaaagctccgggtccttgaagtcggagctttgagcaccaaaaacgcctgctctacgaacccggctttggatgtcacgcggatcgatttgaattcccaagagccggggattctcaagcaagatttcatggaacgaccgttgccctccagtgatgatgaacgtttcgacatgatcagtctgtcattggtgctcaactatgttcctgatgctacgggacgcggtgaaatgctcaagcgttgtgtcaagttcttgacgtcaaaatgccctattgaacttgttcccagtctctttctagtattgcctatcgcatgcgtggacaactcgcgctatctcaacgagggaagattaggggaaatcatggcttgcctgggcttccgtctaacgcaaagcaagcggacttcaaagctggtcttccatctctgggaacacactggtacctactcgcctaaggcttttaagaaggaagagttgaggtctggcaaaacaagaaacaatttcgccgttattctcaacaaaaagtgattatctgcgcgaaaaaaaaatgctattatactccgtgtaatgctgcaagtggaaactactttgcagagagcatgtcttgcggtaagaaggcgaagacagtacccacggctgccaatatcgaggagacgatgagcagaatccaatcaaggatgtactcgcctcgaccgatctcttttccaaagatcttgagatgaaatgcaagagggaagatgatacagatcgtgaagcacaagaatgaccccaagaaagccatgatacggtcgaaagccgggaagatgaccgccaaaacaacaatcatggccactataaaaacgcgcaccattgcccgtgcgatcctttgccgtgttcctgagctgttttcagcaagaacatggccccctccgagtccacaaagaacttccattgtagccacaagaggccgagcactatatacttgtcagcaatgtccgagaagtagtgaagacgttagactcacttcaagggcactttcgtgagggggatgattgagatgaaaactacaatgcaaacggatagggcctgtgggtaactggtgaccgtgagaatgttcgcagtgatttcgtcgcggacgccatcgccaaacattagccagccaatgatcgccattgagcagtccaaaataaactgtcaactcgttagaattgaacttcatcctgggacttgatgttcttactgtaaacagataggtcacccgaagactcttcccgtatttctgaggatgcctcatatctctgtagatgttagggaagacgccgtggccaccccaaggtgctttttaacaagttagcctcatgatcacgattcctttctgtccttcactcacacataatgagaccaaaactcagagggacggtagcccagttttcagggaagaggaatgtcttagctggctgccgcaaggagcccggtgcatctggcttaatgaagccatcgatgcaaatgagtatcacgactttcgaatgtcagttccatctatcagcacggctcggaagaggacttacttgatgtgcacgaaattatacccaatatgctggtaatactcaggaatcgtaggggcaggaagttgagcggaagaagcacaactccacacacgatcttccattggaggatgctcagtcctggcaccagagcatataaactgtctgaaaagagcacaaccagcgccacacatgctcctaaaagttccaagcagaagaggaaacttgtaaccaaacgggcatgttgcccgaaactgatataagcaagatcggcatacgtcacaacggtctggtcgacatccagacatttagccagcaccttggctgtataggaagtggtaactgccgagaagacaagaaataccaatcccaacccccacccggcatgcttcatcgccaacggaagactcaacaaaccgataccaatcaacacattgaccgagttgaagatggtctgcggaagggtagattgcccaacgatgatattcacctgggtgccatcttcctgttggacatgcttgacaagtaatgggcccgcatccaaatcttcagtcccatctacatgcacatggggatgctgctctcggtggaattgaatcgcattcctccgcgtggaatcactcatccgtgaggagatggtgccatacgatgtcgcaaaagctctatcaaacgacgaagcaagcagcccagcactaggtagtgccctcctgggagatccaggcgctcgtgagtctccatcatcctggtccgagtccgagtcctgaagcagaggccggtccacgtccgagtgccgaccccaggatgggaagtttcttggtacatatgcttggccagtggcaacggcaaattcatcgtccgattgcggttgcgcagagacaaacgacaaccgccgtgggaggacctctgggaaggccgcggctctctgccaagaccgcgcgaagttgtctatactgttgggaccccccgcttggcggactcgaattgagtaggacgacgacctgcgcaaagtaatgagcctaacggtctagctttttcaacaacagaaatcacatacctctgtctaccccccggctcccaatccgnnnnnnnnnnnnnnnnnnnnnnnnnnnnnnnnnnnnnnnnnnnnnnnnnnnnnnnnnnnnnnnnnnnnnnnnnnnnnnnnnnnnnnnnnnnnnnntctctcccccgccggtctccgaatcggcggcggtcggactaccatctagatggccatgatcgtgggagctcggtgtcgcaatcggtatcctccgtgagccatataccggttcactgtcgtgatcttgatctgttccagccctcgacatattttccggttaccaacacgatagtagtagagcagcgacccaagagatatatgaggattccaagttgggagttcccgaggtgaagtgcaggaaggaaagtcaagaccaaggaaaggaaaaactcccctcacttatcacatggagatagctcccagagaaagataagaggcgagagcgacctttcgatattgaaaagagcttagcgtcgaaagagcttccgctggtgtggggtgcggatcccagagatttgataagctcgagatttgtatgtgactaattgaatgggcagttggaatctgtagacaggatatatcatttctgtggttcctctgtatgaggcagtgatatcaggccatatggatgtcactttcctaggacctaacattgtgttttagaaaagtccagtatatacgaaacataagaaagataatgtattgcacatgtttcgcatactatgcaaagccagaagtggtatccatacggaggactccgtagatactcgcctattactctgtgacatgctatcatgcaatatatacctatatatagatagtactacacatgtacatagccgaaagtagcagaaggacatgtataaaagaacaatgtacctgtacctgatcacccggtcttaggccacaacccggcaagtaccaaatacgtcacgccctgggggtagccctggcttacctcagcgtgccagccgacccctcgaacaaacttgtccacggatgtatgtccaaccccacgaggaaatttgctgtcgcttctgaacgtcatcttcagtaaaggtatgtactctccgtggttgaatctatgagtattaagaagaaaacaccaatattcacttttcactcttttttttttcttttttttcgcacctactaactgatcttaggtgtaaaacaggcaagcctaaatctttgttcgccgactcccgcccactttactgaccaaatcttcaggcgtctgcagggcctccgataactcttcccctgatcaactgtcgcctcgccaagatgagcgctcctccgccgaacgaagctgagaagaatatcgagatctggaaggtcaagaagctgatcaagcgtcttgaagccgctcgtggaaatggaacctccatgatttcgctcattatccgtgcgctgccccaaccccgtcacttatggtcgccgctaatatgccaattcagcccccaaggatcaggttagcagagcagccaagatgttggctgaagagtatgtacgtgaaaccatatccctctgatctgtctgcgccgaccgtcgcctaatcgcacaatagggtaccgcctccaacattaaatctcgagtgaaccgactctccgtgctgtcggccattacgtctactcagcagcgtctgaagctctacaacaaggtccctcccaatggactggtcgtgtactgtggtgaaattatcacctcggaaggaaaggagcgcaagattaacatcgacttcgaacctttcaagcccatcaacacatccctctacctgtgtgacaacaagttccacaccgaggcattgagtgagcttctcgaggccgatcagaagttcggtttcattgtcatggacggtaacggtactttgttcggtactctcagtggcaacacccgtgagatccttcagcgtctcaccgttgatctgcccaagaagcacgtgagtgtcccgactgattgattacgatattcatccatactgatccatacagggccgtggtggtcaatctgcgctgcgtttctcgcgtctccgtgaggaaaagcgccacaactacgtgcgcaagatcgccgaattggctgttcagaactacatcaccaacgacaagcccaatgtcgccggtattgtgttggctggttccgccgatttcaagaacgatcttaaccagtccgacctgttcgatggtcgtctgcaatccaaggttatcaagattgtcgatgtttcctacggtggcgagaacggcttcaaccaggccatcgaattggctggcgagaccctgagcaacgtcaagttcgttcaggagaagaagcttatcaaccagtacttccaggagatcagccaagacaccggcaaggtctgctatggtatcgaagataccctcaaggcaatggagcttggtgcagccgaaatcttgatcgtccacgagaacttggaaatcactcgctgggtcatgaagaactccgcaggcgctcaggtgatcgtccacacgactaaggcccaggaagccaacaaggatatcttccaagacaaggaaaccggaatggatatggaggttgtcgagtcaggctctttcctcgaatggcttgccgaggcctacaaggactttggtgccaacctggagttcgtgtctgatcgatccggcgaaggaaaccagttcgtcaagggtttcggtggtatcggtgccattctccgatacaaggtcaactttgaacagcttgccgatcacagcgacgatgacgagttctacgatggtatgttcttccagttttccgttttctatgtgtatgttaacaagaacctctacagattgacggtattgccccctcgcagagagcgaggatgaacggccagaagctcccgcggcgagtcttttgacggctcgccctgtggatcatacaggcggctcccgcgatggaactaaggcatccgtgaaggataaccaaaaaaggcctggtccacgccccgtgaagctgctcagaggtgagacatccagctaggctatcacccaggtttagctctaatgtttgtgtacagtgtcgtccaagctccaagatacgcacactgagctcgcctcagtgtctgagatgaagaagaggtttaaattgcaatttgaaaggttgggtgcagtaatctgcaacgtttggtcgtccaccgctgcttgcactgcttactctatgtaagccggacggcgttggattgttttatgtccccgccagttctgtcgtttcatctctgaatggcattttctggtacttcgctcgttatttgctcgttattaaaaaaaaagcacccgataggtgatagaaggtgctatttattcttattaagttttctgttttatcttgcggtatatgtacactttgtccatatcatcgacagtgcgtacatttttgtttcatttattcgtatagtaaatcggatatctgcaacatatgacataacgttctcagtgcgcttgcaaaatcgtcaatgccttgctctcaagcaaaagaccgatcagtcagtcaagcattgcttgaccttagctgatctttccaggtccccaaatccttacatgtctcagtgacttgacgcaaatcatcgagggctttgtggactgcctctttgttcaaatccgagggtgtccatccacactcaacgaaaaagatatactgccaagacttctttagactcggcctcgtgttaatgctcgtaagattcaagccatgagccttaaagatcaacagcgcatttgccaatgcaccgggagatgaatgatcaatcgtgaaagtaatcaaagtcttgtgcgtggcttcaagggcaggctcgccttccaccgtaggcgggttcggcagcccgagctcggcctgggcagtccgctcatcgcgcacatttctgaagatcagaaaacgggtcgtattgtccgctctgtcctcgatgttttccacgagaatgtccgtcccgtgttgttctgccgcaaagcgattggcaatggcagcgcctcgctccgttgtctccttggagacgatatccgctgccttggatgtggatgtgacgtcctgtctctcgacacccttgaaatatttggtcaggaaactttcgcactggccccatgcctgcgagtgtgtgtatagcttggttatcgagccgtcgtagtctgcccaaccaccggggtatgtgcccttgcgcaccattaggcagtggtgcactgtcaagtaatattctccgcagactttcacgtctttatataaaccattccggtctgccaggaggtccaatgtctgcattacagagccattggttgagttctcgcacggaatcacggcatagtcaacttctttcttttggagagcggcgaaggcatctgggaatgagacttcaggttgtagatcggcgggtaggttgcaaaaagactctgcggcagcctatagcaaggatcaatcatcaagctaagttgcatttgcagggatatgggataaatttgtacctggtgcgaaaaagaccctagcggacctaggaaggcgactttcaggcgagccattgtgattgtggtatggatgggtttctccgtgcttattgagctggacctattgaaatcaaatcaaatcaatattcggcttgtcatctcatcgacaggcgacatcggatctgcgagcggtgtggctgaatcccgcaatgagcgacagacaaacaaatcaaacgcgggatgaatctattgcttcaagtgaacttgcgattatcaaatcgcccaattcagcactggagtcggtgtctttgctcatgaagacaaatccactccggcccttggtctcttttcgaggcgggcgtcatgcatatcgagcttactcctcgctctccgagcggttgcatcatgaactgaccacaaggaaacttccgttgacttacgattatctgcacccccaaccctcgcatctcctgaaccttacactccgagatcttcttccacaatcccagggctcctcggattatgcgactttaccgtcattacagaatccgtccccactcccggccggtcatcacttaatctacttcccgccgcaggtgaccttgtcccaattactcccggactgcacagatacgctacacacgccgggcgaaccatttaatcggcgcctttgggcaggtggaaatctaagattccctgtgcgcagtccgcctctggatggcagccgcgcagtctgcatagaatccattcgcaatgtgacagtgaaaggccgcgagggggacgagaaagtgattgtcaccatcgagcgtcgcgtcggcaatgttcccgaacaagaaaccgccgaccagacctgggaccgggtatggaaagagaacgaagacgatgcgggggaatcgtcagtcattgagaaccgggacctcattttcatgcgcctaaagaccagcgctcaaatcgaagccgataaagcgcaattcggaaagcctgtcaggactgtgaaacgtgaggatatactttccaacccttgactatgatgtcaaatgtactaatgattctggcgcaatgaagctccttccgatgcgacattccgccatgccctcatacctactaaggcactgctattccgattctccgcgctgactttcaatgctcattctatccaccttgacaagggctatactcagaaccaggagggatacccaaatcttttggtgcacggtccgttgacactcacgcttatgctgagtgtgcttcagcaacagctgagtagattgaatctctgcatcagtacctttgaatataagaatatagcgcctctttttgttgaacaggagctggtgatctgtggcaagcctaaaaatgacactggggcttgggatgtatggattgaaggtccagatggaggattggctgttcggggtactgcacggacgaggtcggaatgatacccaattatattccacaattatacattattcaatgcgacagcacatccgaacgatatctttccgggaaatatcttgaaataatagtaacagctaggagtgcgaagctgtcgaagcagatagaacaatcaatccgtcgatggatacaaggtagttacgtaaacaacggatatcggagaaactcccccgaagttagatttgcacacctttttccttccacctgtccttctctttctttcttcaaccacacagtaatttggctattttgtgatcggctgtaatgatctaagtcgtgatcaattaaccatcaagcatcttcttctttctcaagatggatgccttctgggcagctcccccggtcattaggtatgcagattctattcgctgatcccaagctctcatcactgacttgccattcaggacccttactgccttgactgtggttcaatccgctttgatgtatagcggcttagtgagcttctattgggcgctattcgtgccgagcctgatattctcatggcgtccgcagatctttcggctggtcaccccatttctactaaccggacccagattaagtttcatatttgatctaattctcagtatgatgcctcggtatcacattgacttgacctgatcaaattgctaatgtacggacagtgtaccgctatggcagcgctgcggagaggagcatggcccccggagagttcttcatttatctcctatttgtagctttcagcatcatggtgagtgattcggtagaatctgctttttttcatctgcgttcgcgttcatatccaatccctcgctataactgcccgcccagcttcaaaatctagctgaattcggttcctgaaggcgagggaaagcacccctgcatctgtgcaacaccatcataattcgcaaaattcaggtgttgtgcaggtgtgggcatggtgggattgccttcgagctcactggcgtgatttcatatcgcgtcggtatcggaggtgccctacatttctatatacatcatctatcatttccaataccatctacatcctatttactcgtcatcctggtagtccaacaatgtcttccaaatttgctaactttccaaagctcactgcaggtggttatctgggacagcctatcctcctgtcacgtaagcctgccgtaccttgtttaattctcaggctgacactgacttgaactcagccttgatcatggcttttgtctacaccttctcccagacgaaccgaggaacaaagacgaggttctgggtcatcgacatcccggtggtactcctgccgtatgcaatgattgtcgtcggcatggtgatgaacggatgggagcacgtgctgtcagatctcacaggaattgtcgctgcccatacttatgatttcctcacacgcatctacccgactttcgggggtggaagaaacttcatccctgtgccccgcttcgtggagagatacttcaccgaccacgaccccaacagcggataccgaccgtatggaacggcgagccgcgcaccaaggccggctgagccctcgtcggcatcaggatcatcctggagcagctggacctcttcgagttcttggaacggcagaggcgctggccgaagactaggttagatcgagagccgtacatgctctgcgccgttgtcgacctgcatgggagatactttgccctggcagacgtttcaatttttattgtgcccatatggacttgagatagatagtgataatcaataagcacacggttttgggcattgtttgcccacaaaaacagatttattgaactccagtagttaatcgtctttgagtatatctatattgaccaattggcttgttttctcaattaatctatgcgatcagcaaaacctctcctaaattggaagtccttggaatcggaggcgtaaaaagtcgagaactccaggtcacgtggtgccttctccaggcgctaaactgctttgggtactggagctgccgcactcgcaaaatttccttcgacaaattttcggggttttcaccgcgcatccttcaacgacaaccaacaaaatggcagtcgtcaagacctcggagatggactacgccatcaagcctgaagcgtccgttccttccgttgatacatcggattggccgcttctgcttaagaactatgagaagcgtacgcttgtccttaaaactccacgcttgaccagccgacattgacttcttttgtagtgctcgttcggaccggtcacttcactcctatccctgctggctcctctcccctgagccgtgacttgaagtcatacatcagctccggtgtcatcaaccttgacaagccgtcgaacccttccagtcatgaagtcgtggcttggatgaagcggatcctcaggtaaataaaagtccatcagaacccctcaatggtttcgcacttttgctgaccacattcccctctgtagagccgagaagactggtcacagtggtacccttgatcccaaggtcaccggttgtttgatcgtctgcattgaccgtgccactcgcctggtcaagtcccagcagggtgccggtaaggagtatgtctgtgtgattcgtctccacgacaagattcccggtggcgaagcccaattcgtccgcgctctggagaccttgactggtgcgctcttccagcgtccccctctgatctccgctgtcaagcgccagctccgtatccgtactatccacgagagcaagaactacgagttcgacaatgagcgccacctcggtgtcttctgggtcagctgtgaggctggtacctacatccgtaccctctgtgtccacctgggtcttctcctcggtgtcggtgcccacatgcaggaacttcgccgtgttcgctctggagctatgggtgagggccctggtatggtcactctgcacgatgttatggacgcccagtgggtctacgacaacaaccgcgacgagtcttacctccgcaaggtcatcagccccctagagactttgcttaccggctacaagcgtattgtcgttaaggacagcgctgtcaacgccgtctgctacggtgctaagctcatgattcctggtcttctccgctacggtatgtaaatttcttgcccctgagtttttcttgaccattactaattctttcttcagaggccggtattgagtgccacgaggaggttgtcctcatgaccaccaagggtgaggctatcgccattggtatcgctcagatgtccactgtcgagctcaccacctgcgaccacggcgttgttgccaaggtcaaacgttgcatcatggagcgtgacctttacccccgccgctggggcttgggacccactgcccttgagaagaagaagatgaagaccgctggaactctcgatgtaagtggctaagcagccttctctttcgtccaatgtactaacttgctctcagaaattcggccgcaccaacgaggccacacccgcccaatggaagagcgagtacaaggacttcaaccttcccatcactggaacctccgctgttgcacccgccgctgagactaagaccgaggccgaacccactaaggcggagtcccccgagcccgtgaaggaggaagtcgaagacaagaagcgcaagcgcgacggcgagacagccgaggagaaggccgagcgcaagaagaagaagaaggagaagaaggaaaagaaggagcgtcggaagtccaagcaggatgatagcgatgacagcgattagatgcactccaggaaggccgtcaggtccttttcctgtaccatattttgctatttccggagtcttgggtcaaaagggaaatttgttctattccagagtttcatattgaaggctgcctatgtgttgaatctaccattcttaaaaatccgagtaacgttagcaaatgaatcacgtacatgtagcgcttgcttgttatgttatccgaagctattggctgtaatatatatttagttgtatgtatggagtaccggagtgcaaccattttatactttcgttattccaaagcctccttggtactccttagtctcttatattcatcccatttcaatcaactttaatagaatcaaagaccgcagaagtgtagtataaccgcaaatggaggcggtcaatgctttgtcctcgatgtggatctcgtgactggacatcatctccgcatttctttcccctccactttccacttcatgtctaaactcaatcctcaactttatctctcgaacttggatctgagatcaaaacaaacccaagcatcactatggcagcagagctgacatccaccaagctcaacccagagagtcacatcatcctggtaagtattactccgcacctccatgataaagcgggacctaaccggctgcttccacaggaccaaccactccttcgactacctcttgaactggcccgcaggaattttaaaaccgtacaacgagccgtcgagcgagagaaagaatatgtcatccccgcaatcaaagaggccgccgccgcctcactctccaatactcaaacgcccgaacagaccctagctgcactcgacgcaatgatatccagaatgcaaagtctcaaacggaagatggaaggcttgcaggaggaagagaagaaaatacacagccaatctcgcaagcgtattcagcacctggagaccctacataaaattccgagcctagccgatgtcaaatacgaccagtggtcaagggtacggctggaccgtttactcgttgaccacatgctacgctcaggttactcagaaagtgcgaagcagatggcccaggataggggggtagaggatctcgtggacctaggtgtattcacacaagctaaacggattgtggatagtttgcgacgtggagaaaccaaggaagcattgcaatggtgtggagagaacaaggctgcgctgaagaaaagcccggtaagttggaattgccttttcctgtcttgaagccgtctgctaacataattcttatgaagcaaaatcttgaatttgaactccggctgcagcaatacatcgagatggtcaggacacaagacaagtctaagaggattgaggcaataatccatgcaaagaaatacctcataccgaactatcaggctcagaattccgatattatgcgcgctgcaggattactggttttcacgcaggacacaagagccgagccttacaaagtaagccaaacattcatatttaattagtagtgttctcattaatggattacagtctctctttgcgcgggaacgctggaagttcctcgcggaccttttcatcgagacccaccatgagctgctttcattgccggcacaacctctattgcatattgccctttccgcaggactttcagctctgaagactcctctgtgccactcggcatatacatcgtccagctcaaactcacagtcaacatcgacatctgtatgtcctatctgctcaactgaactgaacgagcttgcacgcaacatgccatacgcccaccactcaaagagttatgtggaaagcgacccgatagttctgcccaacggccgagtctatgggaagcaaaggctgatagagatgagccgtaacatgggaacagtgaaaccaggcgacgtcaaagacccaacaacaggacaggtcttccacgagggtgagatgaagaaagtgtacattatgtgattacaatatgtgaactcggacagacgtctaccaaggatgaaacgagatactacaacttacttacatatattttcttatagttttttttattgatttgaaacatgatattacccctagttactcgctatcactagaatcatcatcgcggcttctcttcttccctcccttcttgaccggctccttctgcttcacttcaaagacatacatccgagcctcccgatcctctcccttccatccgccgcgctccccatcctttccttcaatatgccctaccgttctcgcatgagaatagccctcataagaagtccaaggaaaccggaaactagtcacaacaaccagccccgcatgcctcgccaaatccctaatattccaaagcgtatatggctcaccctcgaacagagtaacaaggatctgaccaggcccagtccggaatcccttcccggtagtatcatcgtcttttcctagctcctggccctctcctccttcctcatcctcatcctcatcttcttcttcactctcctctccatctgcatacacccactcatcatcatcagcatccataagcggcggcggcttcgaaacaagcggtatacacgccttgaagaatgcaaccagcagctcctgattcgaacgaacctgtcggttcacatccgtagaaagcccacccacatgcgggaaattgaagcagatcacatcccacgccccaccgggctggtacggtggtcctgctggctcgtctttctggtaccaggctggtctcttgcgctcgcggcgtgcgaatcctgtgcggatttccttgccgccgcctgccggagcgccgagtttgcgcgcgtccaccgagaagacgactttgggggtttgctggttgggattggcactggggttggggttggttgagtcctggtcttcggatttgctttcttctggctggttttcggtctcgttgcttgctagttttgactttgctgatgcgctcaggatatctgagacgttctgaggagcttgcgggtacttgttgtatagcacttctttggaatcgtagcatgtggcgcataggttgcggcacttgtattgttttgcaagagaacgggcgaatgagaagtcacctggttgctgttagaatttatgtttccaggtgtaatagataaatcggtgttgaagcgtgttacatgatcttgttcttatacaggaatgcatattggttccaatctcgtatatcacagtaaaagtgctctgggtatagactccatgggaaaatatacatatatagcttaattgcaaccaaattcttgcatagaatgaagaacgcagcgcaatcatgtcaactaaatcagaagaaaagctcaccttcaccaataaggaggattcgatccttccttaaaaacggcacgataggtctctggttcgcctgcatggaggctttcttaggtgggttggcattaccacttccctgcttttgcccattgccatgctgctgtcccttggcagggttggaagacgggccagatggtttgcctggtccgcgagcgcgcggcggaggggcatttttgactttcttgttattgcgaggcatgactgaaggcgaagaaaaaggagttcactttcaaaaaggaagttatatgaacttgtatgaaacaaatacggagctgtcacctgtgtctgcgactggaagatgatgcagaagaaaagcgccccggataatcaaatatccgaagtatataacgacttcaatcttctaccgccctttggtttgattttgttattttagtccaacccaaacttgaaaatttggtttgcattaattctctctagacataccactggaaataactcaaggtagaagtacatatcacgtgatatatatagttggtacctaagacatgcagtatatagagggctgtcacgtgagtcaatgtagcagggcagaacgcgactccctagtaacgtcactaccaaatttttcgacctcagatcggaccgaggatctaatttttgtaccttttgggtaatatgaatgtatggcattctaattgttagatatattcgaatgatacaaaaggaagatatggtcaagtgaagctaaacgactcgtgatatcaacctcatgaacagacctatccagcaacttccaagtccaagatcatggaacatagaagaaaataaccggaggaataagtcatattatttatagaaaaacgttctattagaaaaaacaaacagagcacggcatagctatatacattgaacaagacaggcaaggatggatgctatgaccgcatgtcaaaacaaggttagaattaaatcatactgtagaccaagagcagggggtcaggggaaaccgcaaaaaggagtctgttttccttcggggaggagagaataacagaaaagaagagagaaaaaggaatcaaacaccaacaccgaccaaagtgatcgcaggatttcccaatcagaccagaaaacacccttgaatttggctgcaatgaaacgtgaatcataatgtcacatgcaaaggagcaccgtggacgcggttgactttttgtatacacactgaccagtcagatgcatattgccattccaagccttaggagcgcagggagtctctcatgctctggctgctggcactgactggagtggggagaacaccggtacggggcttagagttttgcttgatcttggccacggcgtagacaataccgctgacgaagccaacagcgatggcggaaacactggggaaggtgactggcgcatcgaagaagacgagaccggacacggcgataggcagcttgttgagagcgccaaccatagagtatgtggtggaggaggtagtgcggacacaccatgcggatgtgtaagagatgaagacagaggaagcaccggacagaaccatggcgaagaagataccctcacggttggcctcggggaagttgcgggcgaggttggcggatgaccagtcctcgacaagcagggtaaggacgatcaagacggggatagaaaggaggttgttgtagaacatggctggagagaagatcatgttagcaaacaattgaaacaagcgtagaagaatcacatactgtcgaaatccttgaagttggtcaacttgatgcgcttgcgcatgcccaggacataggaagaggtgcacaggcagttgatcaacatccagacgtatccggcgttcagggtggagaccttgctagaggtgtcaccggtgctctccacggcatgcttgatatcagcccaggcggcaatgagcgaactgacaaccatcagaccgaaggagaacagagtaaggttagtgaccgagccaccaaaccagagaacctctccataggcaatcaggataatggtcaagttcttgaagatggtgtagactgggattgagaggaactgaagggccttggaaccagtgtagatcatgccgatcagcaggagcgtaatcgggaaccctaatatggaatcgtgtcagctgggatatctcttagcttgcgataatcggagtccatacactttttggcctcatcggagttgaaatcacggtaggtgataagacccatagacttgcatgtttgaattgccgcaatgcagaccaaagactgttgatattagcaattcgcctcggatcaagactgctagatccaatccaccacatacctggatacagagcaagaggaagttcagattgaagtccaagcccgacagaacatacttgttcatcacggtcatcataattgacgaaccacagtatgccaaaacgggaaaagcggggttgttggttatggcgggattggcgcgcggcgagggagtcggcggcggcgcagcctcgaactccttcccttgatcgatcttgttcatgtcgacggtgtagtcgtcggatttcttgccttcagccatgttgagtgaatggtcgcaaataggggggcggggaattgtgttatcggctgtttcttgaaagaggaaggaactgaaatgacagatagcacccagaatatatctaggggagtcgaggaacaaaaggagttgttcgaggaggtgaccaaagaaaaaaaggccaaaggaggttcagaattcgcggccggaaacagacacgtccttacctaagcaaggcgttaggggctgctgactcaggattttatttatagaccgataactagatgtactattgcattagaaccatacggagtacgagtacattggtagtctattgatactgatagttagggattgaaaacgctcaattatgtcaattacatgatatacgatctaactacgtagttggcagttgtacctttggacttacatattatggctacgtgcataaagtataacgtcttaaagaatatacaaaaattggtccactaactaaaggacaagaattaatgaaatacgtacctcatcccaatcgcagactataaaagccccgagaacaaatttataaaactgttcacgcgtccgtaccgagcccatataccagtggagctgctcccgaccttccaacctcaactctcctaaccacacactcccctaaaaatcccaatccataccttcacattgggacattgggctcaaaagccaaaccaaacagaagagtcgccccaaacccaccaaaacaacaaaaaaacaaccaaatccccaaccaccccccgcactttcccccaaaatgcccgactcagacgacgaagccctcttcgccgccctcgaaaacgaagatgacaccctctaccgcgaccaacgcatccaccaactaaacgccgagctcgcagccacaaaaaacaaccactccgcacgggcaacaagcggcaacacaggcctcatccaaaacgaagtctacccaacactctcgtcggaccagtccgtgctagacttcacgacgcgtacgagcaggtgtctggtgcactttgcgcaccctgattttgcgcggtgcgcagttatggatatgaggcttggcgagctggcgaatgtgcactacgaggtttcgtttgcgcgggtggatgtgcgtaacacgccgtttattgcgcagaaactggggatcaaggtgttgccttgtgttattgggttcaaggatggagttggggtcgatcggattgttgggtttgagggacttgatgctaggggctttgatggggttgaagggtttgatgtgaaagtcttggagaagaggttggtctttaagggcattctgttggcggcgaagattgggggtggggaggaggacgaggatgtgagggaggaggaggatagtgatgacggtgctggtgggagaggatttgggaggaagaaggggagacgtgggattcgggactctaaccccaatgtgagaaaccgaggtgacgacgacgatgacgactgggattagtagtcgattaaggatcttgtttcttgaaggttatacccggatattggaatgttcattcatgatttctgtatattaatggattgatgacccagatttatgttcatagttggatgtttagtagcatacccatgccatatatccatataccgagacttatacaagctgtaaagtaaccacctggcaccttgaaaacctcaactggcactatgtgtacagcatatgccacgggagtaagtcttgggcaacttgagattaagattgaataatcaaagtaaatgggattggagcgagacacgaaaggccaaggcagactgtcatcatagaattacaggcaaaaaaatatcaaagaccgtaaacacagagccatctcgacggcaaaggaaaccaaaacgaaaagaaaaaagcagaaatggagcaaaacagcaccctagagttacaacaaatgccgtggaaccgaggccagaagaagaacaggggggaattctatacatagaagcagaagtagaaacagacgcaaagcagaacgttgtcgcgcatccataagttgcacattgaatgccgggtgcccttgaaaaaccgagactcgagagaagccggaactggccggactcaaaaagcaaggcttattctaaatagccacgttcttcatttcgccaaggatctccgactcaatggcggttgaggactccgcggagtcggttttctcggattccttaagttctttgggcttggagaacccttcgttctccttattggagatttgcggggttacaatctccatgagatcttcagtctgaggttctttgttttccttggtgtcttcggagattgtgggtcctgcagtgacaacgggacttgtggtctcctcagtcacgcgtgcaagagggctcgacacgccgaatggcgtcttggggctctgggaatttccacccttggagaaacggtgcggcgagcggccgcgttcttcggcgcgcgtggggctgccgtagggggactcgcgactgctggaccgattgcctgaagcgctcacacccagaccattgggtacggggcccttccggcgaggtacacggcggccatacttctgatcagtcctccagcgcaagatatccaggtatgggggctccacattttgggtcttgaattgcttcaacttcagctcattcgtctcctcgtcaacaatgacgtcgccgctgcacagatcgtcggcgagagtcgcgaggaagctagaccacgaccgggcaaccacgtatttgcagtcgtaatcccggccgaaaataatcacctggccccattttccagcggggccgggtgccagatcaatggccaggttgttgccgccccaatcacgggcgaggggaatccaagcgggatgtgagtaggccttctgaactgcaccaggaggctgggagtcctgacggtcgagcagttctgattgccacattgtggatgagggttgctgagacggaccggccgcggaggagcttgctgcagagctgggtgcgggtggtatagttgcgttgctgagatattcgtcgttgacctttctccagttccgccattcctgaacgatctcctcgcagtcgagtagcatagcgctgaagatgacaccggtgggtaggccgccacgttcttgaccgtcatggaccattaacgattcccgcacctccaatggcagactgcagtcgagttcgtgctccaattcgttaatatcgttttgggtacatccttcaccgagctgatcaaggagttcctcataattgtgttctaaccagcgctcgatcttcctccaggagtgagcgaccggtggcggcggtggtgctccgtcgtggaaactttgcatctgaatctccggtgcaccctcaccttggtcgttcgatcgtctcttctgagatgcgacggatctcatccctggtgagtagggatgggtgggggagcccaagtcgtcggagccattccattcggatgcttgtgcccttgcagatccttttgtgggctcgtcatcataggggttggagagatctgggcgagactcgattgcgctagttgcgacagatgtgagcggctcatggcgactttggctgagagggacgtgtcccccggtacggtagggggagtcgtgggaggcatgccggtcataggaggtcatggtatgccaaaaggaccgccatgtcgagttcaacctgcatcacgtcagtaaacataaaccttcgaagggtgtctagagtctagacatccaaaggtagactaacatattcgccatggtgtcacagtagggaaaaaaaacagggcgcaggggggttaaaaccggtatttaggtcgcgaaagcggtcattggagacgggaagaacgtgtcccgacgcgggaatgatcaatagagaattcaaacttcaaagagagaacgctgagagaagggagaaaggagttgttgaaaaagtgaagatgtgaagatgtggtaggggcaagggaagtccagaatcctgaattaggtaaggaaggagaaaaggtggaggggggaagatatggagattatttatgtgtctgtttttatttttcttggaaacacaagggttttgaaaaaagccttggaataatatataggatctcctttcaatctcaatatacttactgagtcctttgcttcagttgttatgatatgactctattccaccaaacccctggccgcatccagcgaagcctcgacgctgtggtatgtagatccttttgatatgatgtcgataatccatcataagcttttgaatgcaacaataatggggtatcttgccaagtatgtgtgttttagtactttgctgcattcagtcttcaatacatgccttccaggctggatacaattacacgtgggcagtctgtatctgaatgccattgtccgagccgccaaagcaatgaaaattagagatccccaactcccgtctgatatgtgtgggcaaggttgggccaaagaagcggagtacatatacagaaataggaacacagaataggagagtttggagtgccgagttcgggttgccttgactgccccctaagaaaccacggaatacagccgagggcgaaattgatataaaattagtcgcggctgggtggatctcggggaaaacaaatgtggctgacgaataggagtcgttagggttgacaatagggggaagagtccacgtttcaaaaaaaaaaaagaactattatatacgaatgtacaatgtacaatataggatacattaacatattaagcctgcgaaactattcagtgataccacgatgtagatccctcttattgaattaaaatatccataggaagaaccctgggggatattaggatccgcactgggttcaacttctcataggctagactccacatcggaattaggaaagctgccaattttgattcgtttcaaacgatgtggctagttcagggcttggtgcaatcttggtcttggcattcaggcacatagtatgttgtagtcgttgaccctttgttattcccttagcttgatacggagtacggagtatatctttatacccgatgatactatccctcctatactcctatacctccgaatatgagtagaggctcttcggccggtggaacatcgaccagtagcttagggaacaccggtcaacacttataccaagttctcatcttcacaacaaccagtatttagagccgacgccaatatcatcgtgagccctgagtgagcatctcattcatagtcacgatactagtgcatgttttccattagcctctggatttgccaatttttctgttcctatcccccaactcgcctttcatcttcctagcccctaacccccacaccagccgggcttggtttacccttttgatcaaatcacctctctttggagagcgttgtcttctcgtgcaaccttccccgagctcggacttacctggctatacttcttcagcatacacacacaccttggaaaagtccgatatgattacactcctcgtgtcagttggatacttcacgacacaatgtctgggtcaagccgtaagctcatattattgacttataagttccaaatctaattgtaccgaataacagtcattgagccaaatcgatgggaggagattgtcgaccttccccgacgcctgttcgaatggtgtgcttggccaaaagacactcaatccgaccccgtatcggcagattggctgatggggctctggatcaaaattccagctgggtcatttcttacggcgagaatactttggaagcatgtacccgtggaagatctcgtagaccagtctgagggtgaaatgctcgaactcccaccagacgtgagaaaaaaggccatggattgctgtctgcagttccgtcagttcgtgacatactgtaccgacatcgaggattatggtggaactaagcccaaggattgggattgggataggttcgatcttggtccattcttaaccattcgcagcctccaattcacaattcgccgggataaagagagactaaacgagtctgacgatactccttcactaggagccataaaccacctgtaaacgcttcggacacgcgaaaagatgaagagatgcgggaagcccaagacgtgaccagcgaccctatgtctactgatttaatgtgagagatatattggagattgaagaagctaagctatgaaattaagaaatttgacaagttggctacttgagaaagctaaaagttagacgctgagttctgataggaagaaccatgatccattcaatccagcaagagggtatttataccctcgaggctaataagcaaactgctcagtctgcaagcaaacaagtttgaacaatcaagcattaatgggatgatccaacaagttttgacgatcttcaagcccctttttgctagtatctccttgtacaactggccacgcccattttaacattctatcaatcgtgtcatagtatttaggcaagtcgatgatgtcaaagtagtttttctcaggtgggggctcgactgcgaatggtgtaaaatccacgaccccggtaaactgaaccctcaacctaccatcaaaataagcatagaggaggcggcaaggcccatacaaatcgaactgttttccgcctagaagaggccaatctctactatacggccgtaacaggtatacacaatacccaatatatagatctattgagacttcctcatctcggaatacgacagtatctccttcgtcagatagggtatccctaggacatagacgtaattaacttacgtgctgcgttagtaggtatcacgactccatcggtataaagtaacatctcctcagccacgtgcccagtcatattcagtaataaagaacgagaggctgtcatagcggaatcgcaagaatggaatgagtctgaacagctgctgtcccagataagagaatacctcggtatagacctggaaggtgggaccgagctagataatgtggagagagcggtggagggcaatcgacaatttcgtatggaaatgctacggcaagcagaagtggacgagcgggagatttgttggcgaaactggccgtataaggatgatgaagatgtgaagatgacagcatgcctcctgagatctaacttttgatgagaatagtatgcttattcatctcggtggttggtatgcctagtcagtaacgctagatcctcctgaaggatctagagttacctgatatatttacatacaggagatattgttttgggtagtatgtacggagtaggtttatctacaatgtcttggcgtcttggcatgaaccaagaggctacaaagtgattcccggggaattcaacgaggcttatcatatgtacacacggagtccgtccacggtaccataaaggaaaacggtcgttagttatatgtactatatattacagtctcggtaattcaaaagtatacccatttgctttcacgcactattatagtactacaaacatagtggttttcgcggtatagcatctacatagtatagttagagatggaaaatccagtatgttcttacgattctaatattgtcctagtatgcatataaccaaacagggctgagatatctaatctgcaagaatatccatagcgtcagatctactagactactaccatgtacgactacttgcactccataatcggatccaaaacctgaccagtgataattatcagattgagggacgagcacaaaaccacaccgatgtggactagtcagatatccagaaaaatgcaatccccatgaaacgagtggcgaggatacaccaaggtacgaagtgccacatcagccctaggtcagtgttgaaagactgaccgaggttgaccgctacttcgaccaaacaaaagaatagaagagttgaacagcgaaaaggcccaaaataacaaggataaacgaggtaaaaggaaaaacaaagaacagcagaatcatgcatttgttagcatccctccatgccccaagccaaaaccaggcgcgccaccacatttcggaaaaaccacgacgccgaacgatggagaaaaggtataaaccacctcatcaatttaccaagcagccagtgccgtgcattatcatcatggtgaacattgcgaatattgccgcaagagacgtatggaaagaacaatgagcaccctgtcgcgggaaaggaagactagaataaaccaaccgagggacccgagaccagtcgaggatgcccgtatgaacagaatgcaagaagaaacagagtagatcaaactgatgccagttaaataaggaaaccaaagagaaaaaagaacaaaagaaacaggccattcattcaacaaaaggagaggacagacaatatcatatagagaagatcgtcatggcagaagggcgattgtggagctatgcgaagcttcgagtgaccggaggtcccgaggtatcaagcttcagaactcgacgaatgtcattctcgatttgcctggtgtctaccacacgagaaggagacggtgagctgaccggcatttgaaatggagacgccgcgtggcttggttggggggaagcatatccagaccgctgatcctgggaggttgccatgtacggattaccatacggcgccggggaacctccgttcgaggcgcggtttgagaccgggccacgatagggaggcatcgaaggaggcgggacgaggtcaacctcacggcgcagaggtgagtgagaatgggtggggtattgatactgaggacgtccagtgttctgaggaatatgctgctgttgcagctgttgattagagaatgaggaatgagacaaggtcaactgagggccagacgtggttcgcataggagtggcatagggaggcacattggaaggacggggcccaaaggatctagcatgatcgtgagaagcataagccgaggaaggcggcttctgcgggggtggattgagtaacaggtgcttcagctcctcggttttgattcgtcgctcctcctcagtcatgtcagaggactgggaggtactcgacggtcgcagcgcattcatacgatcttggtaagaaggagcgaaagaaggaccaatgtgtaagttgcgagtgtaatcagagtttcccatttcaaatgcaaacatgccatcaggattagggcgcaaggctctgggttcggtctgaggggactgaaggaccttgttcacctcagggctgctcgtggacttctggtctctggcttgcacagcagccttgaaaagaaagtcgagaggggaaggcttgggctcttcagccttgaattggttgctgcggttgcgaggcttggacggagtcacatctggttcggggtccacctccgcatcgtcactatcggtctcgatgggcgggaccaaattgggatcaggagccgacttagagaaaaagctaggaatgggtaaagcagatggtgcaggtgatgcatggaacgtcggtcccgcgtaggctgcgctcggctttggctgaggagaggtgacagcaggctgcgttggtgtgtatcggggaccactgttatacccgttgctatggtatccagatgtcgcaggtgaagccttgctgtcccggggcttcttccctgaacgcattggcttcttctttgaggagttgaagttggttaaagaatccacctggatgaccccggggctcatgttatgcggtggggatgatgggggagtagagaggagcgccggtttctgggcgtgaggggttgtattcttcttctgaggacgccggttgttgcgcgatcccttaggggttggtggatgaggagattgggtcgacatgtcgacggttggcttgaaaaataggcagcctggagagagaggtaaagagaaaaggcaacgctatgacgaagcagtaaaaggcagaagatgcggagattgcagcaaaatgagtcagatcactgctcagcaggtgtcgacaatattaaatatggcaacgctggggaagcagagaaagtgacgtgtatcaaactgtggtagtgaacgagtcgcaagttgagtcaaagcagacgctcaaaggtaaagatagacagtctattaaaagaacttgtctacgaaacggagagtgtgacaaaaggtcaaaaacgaagatcaactggagacatctctaaagaggaaaaaagaagtaaagaagaggaagattgaatcattgttgttggttgaagggaaagaccatcgaatgcagacaaacgaggaggggactccgatcccatctcgatgactaatgacgccacctgcttcacgatctcaagaacaaaccaagtcaaacagaactattgactgctggacagggtctcattgtcgcgttgtgcattgagtacccttggagatatctgttgttctaactcccccaaatcagaccttgtccgttccatctcgacgctctacactacaatcaccgctcaatcaccgctttaacctggccatcggagcctcacttacgtcagtcaccgttctgatccccccacctcagctagcttctgttgtctcgcgccaagcatttcaaaccgaccccatccaaattccgacgagaatctcaatatggccgacgtggagatgaaggaagccgctactggctcctccaagggcaaggccgtggtcaaggcctccgataatgccgacaagaagaagttcgaggtcaagaaggtacgcaaaagatctactgtttgcagcgactcatgatactgactggctattgtcaagtggaacgctgttgccctgtgggcttgggatatcgttgttgacaactgtgccatttgccgaaaccacatcatggacttgtgtacgctgaaactaccccccgacgctcttttatcttacaagctgaccgaccgatgaaacaggcatcgaatgccaggccaaccaaggatcatcaacaacagaagagtgcactgttgcctggggtatctgcaacgtgaggacctccgcatcaccccatccgaccatgtgatcataaactaatacctccgtttctatagcacgcattccacttccactgtatatccagatggctcaagacccgccaggtctgccccctagacaaccgagactgggagttccagaaatacggccggtaaagtgggaccaggggtttcaaagacactacacgatacaattcacgatttctggctgatggccgcatgcgcaatggctataacttgaacttttttttttttcaaagacgcttctggatctttacgacggctagggattggcgggcgttcgaacgattgatgtgtcgagccagctccatagtttcccattctcatattccgtagcagacaagaaagcgctgccatccaatgattattacgcttgacaatttctcaatagcttattgcaccttcaccccgtccacagttatacccggagttgccctcgcgcttgttgaacccaaccacttctctgggttacggttgtataccggccagggcgggacaacgacgaaagctgtgaacagtgtgcccgccaagccagtccataacgtaaggtgaatgtctttgtagatgtatccgacgaggaaactggcggcctggagcagataaaacaatcgtcagctcgctctggtaatacaaaactcaatatctgtgcaacatacccctgatataaccagcaagatggtcgacagtaggtctgctagacgttggccgtggaagtcctgttatcaagatcttgttagcttcgatggtccaaaagcgcagagcaataggggcggtgcggcggagcgtacgatttggccttcaatggcatcttgaataggggcgagtaattcatccatgattgaagcaagttaatcagattcgaggtcaacacgccggatcccttgatcgatgccgggcggcttatcgcaatggtgtcatttgtattctgccatgtcggaccgccttgctctctacaatgtacgagtcgtacggagtgcacgacacttcgtcaaagtacgtacacaaaatacggatcgaagctgtaacataatttgaactcaatgatttttccttgagaaattgacccgatgttaatcttgaatcattacgtggttgatcatgatttcattcgatatcatctgccatctatctctagagccacggtccaccggagcactgctggtgggaacctggcctcgagaaactcggcctacggtcgtgtaccggtgtacaagaccctgcaaatccaaacttaacccgaatccaacttgccatgtcggaaggctcacatgcaccctgcaatgcgagaagcaaggagcggtgaaacgagatcttgatggcccatgtggtggcggttagggaaagatcatccttcccatatccaaccaaatacgcattcccccgggtcccaatgctgcaatgctgccacgtgcttgtatgtcaagcgcggcgaatcgctgactcacatgcagcgattgtgttgtgacgacacaaggcgccggtttttaattataggtgacagttgcgccatcctgagcaggctccagcagcttccattggcacgagatattattggaagcgaactgcgcgataatgcggtcagcaatctcggtgaagttatccgtggccagtgccaggatggtaggtcctgcaccggagagacagattcctagcagaccgggttgagtggccggggtcatgaattggagaatttcagtcaatcctgggatcagcgtcttgcgatacggctggtgcaccttatcctgcatggcgaggaagatcatatcaggatccggcggggaacttcccaaggccgctgggaggagtgccgcgcgctggagattgaagacctagccgaggattagtctggaatcagatagtttatcaattctggacattcacataccacgtccgctctcgagtaggtctccgggagtacattacgggcgttggcagtaggcaccacaaagtccgggataatggcaatggccttgatctccggggcccaattgaacttcctgtaatgaccaatggccatgggtggcgcggggggtctgattccggtgtccacaccacctgccggagcaggcaggacttcactgagggggatctctttgcgtgccacgtcctcgggcttaagctcattcagataggtgcccacgaacccaccgaagagggaggcagccacattatccgggtgccgctctgttctcacgcgttagtaagatgtacgtacgaatcatgggaatttttttccccccccgaggactcaaatgaggggcacatagaacactcgaacctaccaatcatcaaacaaaaatcgagtagtcgttccttgctcagacccagcttacccacctcattgcccagcatgacaccggcgaccaccgcagtaccagaggagcccagaccccggcctaacgggatggggttggtgatatgcaccttggtctcaacggggaaggcccgctggtcatgacatctgaggacatacagggctacacgggtgatcagattgacttctggatcgagactgatcttctcaacactcttgctttggtcctcataggtgatggcgcagttgaaggggagctgggatgagggtttggcctcgatggtgacgtggagatccagatagagagacaatgccaggccgatcacatcgaatccggggccaatgttggccgaggagcaaggaatcttgatcacgaaggaagtcatgataaagatggctatacgtttgtgtgttacaggggtctaaacacacaagatgtacaagatcgtctgatagtccggtatgtgactctgagaactcttggcgccaccaaaaaaagtggccgacgtcggaaacgtaagtggagaccttttcttcattaatcgacgatttcttttgattggatttgattggatttgtgaggatgtcaaatccgatctcgaatccgattgcatatattctgcattgtcggtgtgtgtttaccctatacttcgtattcttgcacatctgttccatgtagaaaggcgaaacttgagaaaaaggggctatttttttaccgagatagattgccctagaatactattgtgtcatataacctgaaaatagccaaatgccaagggcaacaaaggtccaaggccaatatgtactcccgtaggatggtagtataggaccggggggaatgcaagaagtcaaagccgcatagatgacattcggcataaaatgcctcaaggaattactctttgagtacgaaaactatgttgtacggcgtactccgtagagacaatgataataatatgacaggttattttatagtccctcttatagacctgctgaaacggggggtacccgcttgcaaaattttcacctttgtttctccctttttctcggtcatatcacctcctaacctccccccccccccccccccccccccctctcttcatnnnnnnnnnnnnnnnnnnnnnnnnnnnnnnnnnnnnnnnnnnnnnnnnnnnnnnnnnnnnnnnnnnnnnnnnnnnnnnnnnnnnnnnnnnnnnnnnnnnnnnnnnnnnnnnnnnnnnnnnnnnnnnnnnnnnnnnnnnnnnnnnnnnnnnnnnnnnnnnnnnnnnnnnnnnnnnnnnnnnnnnnnnnnnnnnnnnnnngtatatcccccccccacccccccccccccccccccactgtttttcttaccttctcctattattgcaaccccctgaggttctttatattgaatatcccatatcttcaacccttttgttctccccagtggtgactctgtgggcttctggaaccacctcggcatcatcgactctatttggtcttcgccacttccacccttcccgcttttcccactgaatcccagcatcttacgatttaaactagaattttcaattgatctctagtcttgaagcttgagaactcgaattcgatcattaacgtcattgaactcgcgaacctctcgcgcctctcgtctaacagcaaccctggagccaccaagctcctcatcctcccacttcttcaagttggcgggacttcgctacaccgaggcctctctcctccaccctcttgcaggccccaagttccgggtcttcggcgggggcgataccagacccccctaactgggctttaggattgtctttattgtggccgctagacgtcagtcggtaacgctagaccctcccgaagggtctagcttatggatggagggccgtcacccttgaacgaacctcttaccggcttgcgtctgctccggtcgttgtgcgcttcaaaagcgaatatcaccaaaccaaacccccaagcaaaaaatcagccaatctggcgccctaatcattttcgtcgaatcctcatatactgagagcccaccatgtccgagtctcccagatccgagaagtacatgtacctgaccaggtacagtactccggtacccgaactggatgatcaccgcctgcagatgcagacgcctccccgcattgaagctccgatggagcgttcttacagcccgcgcgataccactcaaggtcctgaaatgctcgatcgtccagacttgctcagtgcgcaagatgtcctacaggacggtccaattccccgagactttgaaaatgccgcggaggacgatcgttcgctgaatgaatttaatggactgggtcggttctcgatcgaccacaacgcaacgtaccagactccgcgtcgcatcagtgttgtgaacccggaactcgccaacgcttcctgcgcctcgtctgtttccgctcgatcatcctctcctcccaattcagttgaggcttttgccgacccacgtcgccgtgagcgcgccaataccctggacagccatgcgcctcccgacctggaagctatcctgcagcgcactgtttcgggtggcacccacaaccggcgcccaactttcagcaacgccagtgttgttcgcccccaattgggcgatgtgccattcgatacagcagaggaggcctgctttgacgcgccaggccgtattcccgtcattgattacgaggaactcgaggagtttgtggctctaaatccgagcagtaaaatcgccgatggcgatcgccgcaagcacagcatgagctcgcagagcaagaggccccgcatattttacgatctccgtcctggcgctgaaagccctgagatgggtccaattcagaagaccagctcaactgatacactgagtgaacatgaaaagaaggacgccgaggttacagacgaaaaggagcgggttcgacaaccccatactacaaaccagcgttcccgcttcggcttcttttcgtctgagtctcaaagcacagtgcatgctgccgatttgggagatctggtgctccctggcgaaaccttccgcgatctctttgagctcgggcctgagggaggtgtgtggtggttggatgtggtcaaccccaccgatgaggaattgggagctatctcccgggctttctccattcaccccctgacaacggaggatatccaaacccaggaagcccgcgagaaggtcgaactgttcaagcagtattattttgtttgtttccggaccttcttccaaatggacaaaaccagcgaggaattccttgagcctgtcaatttctacatggttgtcttccgagacggtgtcctcactttctcttttgaggacaaccctcatgcatccaatgttcggaaacgtattggaaagttgcgagactatgtgtctctcagtagcgactggatctgttacgcgatgatcgacgacatcgtggatagcttcggccccgtgattcgggatgtggaattggagtccgaggcgatcgaagaccatgtgtttattgccagagttgaggatttcgaatcgttcctccctcgcatcggtggcctgcgcaagaaggtcatgagcttaatgcgcctgctaggcggcaaggctgatgtcattcgtggattctccaagcgctgtaacgagcagtactcggttactccccgtggtgatattggtctttacctgggcgatatccaggatcacgttgtgaccatgatgtcgaacttggcgcatttcgaaaagatgctcagtcggtcgcataccaattacttggctcagctgaatgtcaccaacttggtgttgggaaaccacgtcaacaaggttctcagcaaagtcactctgattgctacgattctggtccccatgaacctgatttgtggtctgttcggtatgaacgtagaagttcccggcgcccacacagaaggattggcgtggtggttcggcattcttggagtgatcgcaggtattgttgttgtgagttttggcctagcccgctggcagaggctggtttgattcttttttgtttattgctcattgcctacttttccttgacttgttcctgttactttgcatttgcatgttgattgactgcgatcgtctactttgatccattttttgttggtttcaagactacgatacctacttgatacatagaatacatttcttattcgtttaaacaattgacttattgaaagttgtgtggattgcatcaagccaaggagtatcattttagaatcattcagcctcatagaagcttagtcttagcctttgactgtggtttccaagacctcacagctgacccatcatatatcaaagtctcatttggcagaggaatatagatggtacgcgtagtactacgtgtcctaaataaggcaacaaggcaacaaggcagccaaattgataagactggcattttccacgatagccagcctcatccaaacaactttcacgtcgactgcatgcagccgctgattttgcctccagcaagaggtttacagctggtgtataccaccgcttgcctgtgataattttattcgccaactccaattctggccattggctgtgcagcgacacctccctccgtctttccatgcgacgccaatacaacgcgctgcagtgctatcttactgcaacgattagcgcgatcttccttcttttcgctgtcacggtcacctatgccgatgcatccgatgtcccgggtacagagaacaccttgagcctccagggggcggttcccagcgacggggcaggattcccacttgcgctggactcgttcaatgggctagaacttcgcgacagtgtcgacgaagatggcgagtcaaatgggctagagctcgtgcgcagataccctaatgtcgcgaaagcattgggcaacaatcagttcgaggcgccgggcgcgctcgagatcggcgctgtccagtggttctatctgccctcggttgtggtgaacggcaaacacgacccgaaaggcgtgggtcttcctgcatacgtgaattctacaaatgaagacgacgatgacgatgactcgacctatgagctacggaaacgagacggggacttctcgaagcgagcgacgactacggtctacttgtcgctcacgacctgccaaaaaccatctaccaacaagaccgacctacaaggcgagttcccgcagttgcagatgtatgtgtcgacttcgcagaaattgcaacagccaggaccgggcaaagacgattcgctgcaggatatgcacactgccgttggcgggtatattggaatcaccttagatacgaataccgacgtcttcgtcggcatcgcagcgcccaattcaaccgactacacaggatattacacgtaccaggtcgcagcatctatcgatgcctttttccacaatatcgtggacgatgacccgaatttgttcttcatcgacgcggacacgtcggccgcgctgctggtgacgaacaacttgactcagtctgcgaagaattcgacaaactaccagcaatggatggacatcgtccctccgtatactatgtttgcccacaatatcaacgatacggcactgcagggcttggagaaatcattctgcgctctcgatgcgctttcgcaggtgggccgaataagtagttcaaccgaggttggcatgaccaatcgcggacttgggaataagcccaaggaacaattctatatcactggactaaaccgaagttcatcgtacagcggtcttctggcaatggtgggcaattcgaccacgtccggaaatggcatcatcggcggcggcggtaaggtatggcgaccgatgaattttacgaccaaagcaggtgagcaagcccaaacaatccataccaaaaagtgactttatctaacaatcctccagaggagaactgcgccgtgctattcaacttaaccttctgctcagaagtcgcatacgcagtcccctccaaccccaaactaagcgtcgacaagctccgcacaatctacgacgactacgccgccgccttctaccagaacttcacctattccctccaacaaatccaatgcaaaacaagcgaagaatcgatgttttccctcgccgtggactgcgacgattgcgcaaaagcctataagcaatggctctgcggcgtcacaattcctcgctgcgcagactacagtagcaacgccacgtacctagccgtccgtaacgcaggccaggccttcatcaatggctcttccctgccggatgacagtccgtaccgccagtccgtggcgtcgaatacatcccgcaatcctatcatcgatgaggagatcatgccgggtccctataaggagatccttccctgtcaggatatctgtcatacccttgttaaggattgtccgtctgcccttggcttcgggtgtccccagggcgcgtggatgaattcttcctatggctatcggaattcagagggtattattacctgctcttatctcggggctgtgtattatttgagtcttggggaaaagctgggggctagcggttgggtgactagcttggtggttatgggaattatgtatttgctgtagataggtataatcactgtgaacttgtgctatttgggttctcagttatttcttttcttgttcttgtctcctctagatagcaagagctcgacctagttcgcctgtgcaccttaatattgcgcttagacttgtatatcatagagcaaataatacatacacatgtaacaaacattaccactccagatctttcctcttccccaatttctcttctttcttctcactcttcttctcttctttcaagactccttccccttcttcaaccgccctatccccccatctctccctccaaatcccaatctcttgcttccacaaatcccttacacagggatcacacgaactcccacagcaatcacccagtcctagtggaggcggcgggtcattatatccccgttctcctgcacggaggagttgttttgtgcgggttcttgttagacgggtcttgtagagctttttgtagagaggtgtttcttcaggagtgtaatatggctctggggtgggttgtgtagttgagtctgagtctgatgttggggcatcgattgatatctttgttggactctttgttgtctctttttctttctccttctctttgtcgttgcttggggatattgcggtggttggctctggagacttggccgagaaagagaatggagcgagcagacttgaaaggaggtttcctggggagtatattgaagatgtggatgtgtctttctctttctctttctcttcctctttctcttgttcttcttttgttgttggtgtctctgccggtataatgatctctttggctttggtgatatttccagatgttgatgccgatgaagcagtctgactctctgatgtctcgatactcattttgatatacagatactgaaatcaatacaagcgaattgaatcatatgaagaccaatttagtctctgttcaaaatctgttatcgcgttagtaacgtttgaagaattgatatagttaactaaagcaaacccacaaattctaggccaaatctaatcctctaaatcttcaattgcgcaaagatgtataatattcataggcacgtcgttgcaataaagaatggaatgagaagaccatgaaggccgaagaagtaccgggaccggctaagaactgttttcgtgcggttcctgttcgttccgatgtccaccgactcctatgtttaggacttggtctatgttgcctgaactggtattcataaataaggcataattggcattttttggctaaaaaagtaacaatacgtccagtaccggtatctgtgattgtttcccggggagaaagacatccaaagaaacgaaacgccgttcgagtatatcaactccgtggtatcatgcagctaaaaaatataaaaagtcgagccataaactgccatcattttcgcttcggcgtaggcgtccaaacatttcccagtgcagacttccgctcagacctcggcgtccctccaacctgctgtaacagcttttgcgctgcaggcgtaagcatctttccctgggaataccccccaccggagacagagcccctactagagctagcaccaggagtagaccgagacccaaaatccagccggggactactaccaaagcgcggtgtcaacgagacaggtgtcttcgtaacacgggcggccttttcagcacgcttgttccgcgccacacgatcgaccatgcggtgatgcagggcttcgcgtttgcgagtttcgccaagtttgaagggatttggcttttcagaggtcggtccgaggaggcgccagtcggcttccatgtcgtcggttctagagtatgtaaattcaggttcgggctcgtcttcgtcgacaaaggcgtatccgttaaccctcggggtttcgcttcctgcgaaggcggatgcggcttcggactcgctgagacgcggccggccggcgatggcatcttggatggcggatagagagggcgaagggggcacggcgttggcggcgtccgctgctgctgcggcatgtgggtctaggagtctggtattttggtagagagttcgcttggggcctgcccgagatgtgatttctgctttctgcgggagtgtctcgtgggtatcctccaccgagttggggaggaacatgagggtgttgtctgggcggcttttccatgtgtctggatttgcaggacgggcatccaggtctgttttgatggcgggctgggcatgctcgtctcgttttataagacccatctgtgggtttccgccttgagccgtgatgcgcttaatttcttgttgctggtgtgcaatttgtcgggccgagggaattttgttcccgctccaaagccagggatatttctcccgtcgcttttcattctgcttgtcaaggactttgttgaaggactcgttatcttcgctggtatactttgcctggaaggcgaccagtcccatattcgatacatcgggaatatgtcggtcttctgtttcggttgccgctgtggaagtcgatacgacggacatgggagtatcacctccccagccatgtggagtgtcacccgggcgtccggccgggaaatgatgtggtgtggctggcgccgatgcatagtctgattttcgtcttgcattcgaccccggggtgggcgtgcgcatgacgcttgccaacttcttcttggagcttgcaatccatgctttgtctttcgattcaagggcttccaggtactcttgtttgatctgtgtctcgagcaagcccggaaagaagtcgcgagcaataatgtgggacaaagtgttcgtgtagacgtcttcgtcgaggacagttgcagggcgtttgattcgcttcgggggtggtggtggaggcataagctggccagcagattgtctggccagctcctgcgaagggggagacgccatgtttgtagagcaaaggctgagggagagaataatgaaacctggaagagaggtggatgaattagtggcgataagatagcgggtcatatgattttgatctaaccgctttaggcaaccatacttcagatatcactaacatattgaattgatagatcatatcatgagctaagtagggtttaggtagaggatttagataaatcgtcagataggcaccagctgtgagatggcatccaaagccaaagacctatctagattgtaaagcccaggcttgcatatacatccgatcttactaattgaagcagcgtatccgtaatgcttttttactcggagatctttattggagagtgactctaagatgtaagccatgcttcatcttatgaaactttctcagatataggcagtgacattgtgttggaaagcagcgtcaaacttaacattcgttcgcgttctcctggggttttcgctgagcccgtaagcatggccagccgtcttgcccaaaaatctcctctcaaaggtccggggcgtgagtaaaactgactccaagtaccagcactgcaatggtgtagaagatcgtgatttccatcggtcaggacctatgtaattgatttcctctgccacatcttggcattctctttccgtattagtgctcaggccttgctgctttttgctcactgagtagatctaagcacgccactgagtctcagctgagcctaaccagtgtgtcacgtgatcttcgcttagtccgctcccccttcttacaatgaggaaggcatcggtctggagaccctcaccttcctccctcccttactccgttccttcctcctctcctccttccttctaaaattccccttcctgccttgtgatggtccgttgataggcgggaatcttttgcctttccaattgtatgagcatcaatatctgcatattcatcaacctaggaactcctcaataaccaagccaagttagtctaatggtagggcacctgagggacataacctctgatttttagggctcccaggtgagctaggttcgaatcctgggcttggcggcttctctaaatttattttttttaaccttgatgtctctcatacccctaggtatcgtataattccatgggtatctagaaatatacctatcagtacacattggtggaattatttcgtatcaaatatatgtacatactctctgtttcagtctttctgacgtggagagagagggttgggcatagcgaaagtgaagccatttttgaattttgaggatctatgggtcgttatcttacgtcatagtatatactaccttcaatactattgggtagaaatgagccgtaccccaaaacaatagcggccccacaaccttatttgtacataggaccgtggaagtacgcttccctttcaacaatatcacgctttctaactctcttttcaaagtgctttttatctatcaattactctacttgtgcactatcagtcctcggccaatattgagcttcggatgaaatgtcccgcccatttagagctacattcccaaacaacttgactcgtcgaaggagtttcacacaggcgcggacaccccatatcatacgggatcctcaccctctataacgtcccattccagagcgctccgaaagtatcctctacgtattaaattgcggattccgaaggggccctctcgccgctctccactttctgcttcattaatctgacagaatcaggcatttctaggcaggggtgcgcggtgtgatctctgtacacgatcgacttggaaagacatgaaatgtagcttaaaattggatgtataaatttattgttacactaactacagaccaggctttctttcagtctatatatacaaagcagccagctggtgacatctgtcttccctttcgatatctctctccacgtatgatatattcagaaatatttattcatagatatatttatagatacccatggatatacttctaccatttataggttccaaggtcttttatattcgtgtcaagcctttttgggactatactctcatcatctttcactcatagcctgggttatcaactcctcgcaacccgagaagtcttttctgccctttcatattcttctaatctgataatatttcttctttgattactctcattacctacacaagtatatcatacacgatgtttgcttcgacaagaacaaaccctcctagcactgagaaagcacttcagagcgttcctattatgtcttcttcttcagcccaagatataaaccaggatctcgaacccacatctgttacctatcctaccccgaaagttctaggactggttttactagacgtccttcctgttgagctagtgctactagtagcattttttcttccccgggaggatatatacagcctctcactttgcaatcatcgacttctcaaaatattccaaagtcagacgaagcacaaactgaaagcagaagccctgttgcctttcttacgccggctcgaacatgataatccaagatacttagcatgcgacgactgcttagttctccatcacttcgacagaatcccagagcctttgcggatcccagacccgctagttcaaatatcaccctactacccacccctccttggttgcgtgcaaacggctagattctggccagttccaattgcacataattatgtgcggatgcccatccacgatggacgcagcacccattgtggctatagactccactggtctcatctccacctagccatgcgcggattccaccacggtcccgaatacgggatcagcactgacgcgctggccttcaccggagtatcgcatgaactgattgcaggaaacgactccggattggttctatcttcggtggaggcgcggatatgtcctaagcccgcgggtctgggtctgtatatgcgattccaggacatgattgtcgcgaaaatgacatggctcggttcccaccatgaaggcttcaaattctgctcgcatcaatcaatgtcgttttggctggaggatatgtatgggaacgagacataccagccggagttttattcgaattgcgaggagtgcaataccgactatgagattgggtggctcagaaacgaagagcttcggaatatcactgtagtggtgacgagatgggttagccttggacctggtcttactccggatgatccccgatggaggattaatgcgtactgtgagacgtggggtcagcctcaaggtctgaaactggagtcggaggaaaggggtcctagtcctcggtggacctttgaaggactgactgatacctctgttgatactttgacttcgcacaatctctcctacatcgaagaagacaggtatcaggctgagatggtacgagtttctgatgtgccttcctggggcctatggaagggggcgccttggtaaatatttagttgatatgtggctttgtagataaacaggacatgtgatagtcgctgctcgaatatgttgtacgtacagatcctccatcaagtatttgattcaaggcagtcagtcattgatcctgcagaaagaaccgtaacacaacccaggctgaaatcccactccacaggtcttaactaaaatccactacacataactactctttttctctacacctatacttgcaaagtaacgccaacgaatggtattgaagcctatcagctcctctataaaaatcaaagtctataagaaaaaccagagactagcgaacgatccaaataaattccgaaatttcctccaagaaaatccttttcctttccctctttttctcttttttcccaaatcgcccttccaagacaccaggccagtaaaaatcgctatcgctgagaaatgcatggacgaaagattgaccacagctgaaacacgcagaacagaacacaaacaaaaagatatggcatataggcaaagacaagacaagtcaggcataaaacagagacacaaggaaaacacagatcgtggactcgttgagagatgttgatggagggctatcggatgacaaagcgagaggtgtgagatagatagtcatgcaaggggtgaggaaaggaaaatatcaacataaaaaaaatggggttgatgataacgatagtgacatgtactcagtaatcagtgagagatgatcagtgaggtgatcagagagaggtgatcagtgagaggttgtggggaagagagagtaagatggcgagcgggtcttcctacggttcgggtttctagaaggaacaggaggcaaaggagcctcggttttaatcggcaggggctcgccctccgaaatggacttggcgcggtcatggagtggcatgggaagatctgcaccctcgagactcgtgctgctgccactctgaaggaggaagtgcgcctcggcgagactcttggtctggcggtggtgggaggatgatgtaggacggctgagtgtctcgccggcggtcatgcggtctgttggcatgagctcgcggctgctggacaagctatggacgagctcggggacgctgttcgtcgtcgagatggaagagcggtgcttgcgcacgatggaggctgcgcgagagagcattagactctcttgcgagttgcacttgcttatcggggaaaagctgctgcgtggggagatggcgcccatcatgccctgcgcgaaggggaagtggcggtctgattctccatcagtcgtcatgtactcttcgtacaatggttcgtgggagagtggtttccccattgatgggaggatcgaggaattgacgggatggaagtagtctccgctccgtgcgatgaactcctgctcatagtctgcagttgagggggcctgggaagggattgactgggctgggctggggtccaggtctggggttgctagggcggaggtgctcagtgggctcggctggagctgtcgggttctcggggcgagccaggggccctcgctgcaggctgcgccgacttgagtgtgtccttcgtccatggatgtgccagtccaatcgaagttggaagtggactcggctgcgtgctcatagcagtagtcgatgtctgcgtcccatgagtcatacaattcatcctcatatgatggctgcaagctggtgaccggctcgggtggtgtgacctgcacctgggcgcgaggggtgtgcatgttctgaatatattgggggatagtcggcgagcccaatgcctcggagaacttcctagaaagctcctcggccacatagatcgacaccggagctttgcgcgcgctgctgggcaactgagtgtgggctgggggtggactggcttgaaaggctgagcgagaaggggggcattccatgctggactcggggctgtcccacattcgggttccttcctcttcctcggggacatcttccaaatcatagtggctgctcatggacgaggtcctggcgcggtcatcgggttcgggactgaaaaatcgggttggctgcgctgtttggagatctgggtacgtcatcgtcgtggacaagcccaggatctcgtcaatggcacggggtgccggctcatcagtcccatgtgagggaggctctggcacagcagaaggtgggggagtggtagggctggttcggggatatctggagactggccgcgagaagttctcgttgacgcgggattctctgcgtgcgtggtttgcattgtacagtcgtgtttttggagaaaccggtgggcttatgctgggcacatccaccgtggtggcagtgccaaacgagcgcaggtcatcactggagaaattacggaaatgaatgtcctcggcgcggatacctttcagatcaggctggggccgttgagatgctcggatggccgagaactcggtgaccagatcattctcgcgggtctggtccaaagactggaactgcgagggattggtatgagtcaagtggtggaaatcaaaaggatcagaaataatgcttttcaagcgttcgcctatatcgattgtcgagggtcaattgggtccacaatttccgctgcccgctgcttggcgcacttactgtggtctgtattacgggcccgacggccaaaaagctctctctctggccgggccttctcacgatcggcctcatcttcctcgtccagcgtggcgacaatgttgatcttgctcccctgccggcgcaggatgcggcttccccgcgccaaaagggaccgggacggcctatccttctcggagcggaatcccaatgacgacccggcccggtcatcggagacaatggaactatccgtggaggtcatcgaagagcctggtgagcggcgtgaagaagttgaggtggtggtattgcttcttgaacggccgctaaaaacggacaaacgcctggggctgttggcgtgggcagtggacctggagcggatatgtgcggcatattcaggttgctcgttggaagagttcgtagacggacggtcactgccgtcgtcgttgtcccaggctttactcattggagggggtggataggtcgacatagtgggaagtgaaggagagaaactacaccatgataagatgaaatctggagatctccgccgcctacaatataaaggagcgaaagtggaaagggagggttctcgagtggaacagaacgaggtcctgccgatgataataaattaatagaatacttgatgacgggggcaatacaagacacggagcggtggtggagccgcgttcaggggcgtatttattgtaatttttatttcttttttttttccattattagtatatgatgctatagtcctcctatattggtgttattccgatcggtttggttggtttctttgtttagattggagcggtcacaccatgcacccagccggcttcattattgatcatattccacgccgacaatccaaaaaatgaggaaacaaaagaaagcaaaccccaacatacacgggatatagtgaggtgcctcgaacacccccatgtaaaggacgggaattcccagcgtcgcggagccgatacccaactgccttagtggcatatgcgtcgagccagggggttggtcctgaacgtgctggagacccgcgtgtgggggagccagaaagacgctaggccgcatgtagtaaagtatcagcgttccgatacgccccgtctggcgatttaatatgtttaatctgtatttttggtatttttgccgtacctcaggttccaaggttccaaggttcccaggaaggtttaccgttagctttggacccatggacacgggaaagagggggacacacgatatacgcgatcgggcttatagattgagtactactgtagtactacaggtacatggagatgagcctagatatgtacttcgtatagacaaggttgccattgggctagatattcaattgcatatccaattggcgatattgaaacagctctatacttgattctttatttacattcgagtggggagacaagcccttatcacgattggggcgcacactggaaccttggtcgtctgtttttctcccttaaaacattgtataagtatcagaactacatatggtggtttgaccttttcttcctacatagctacatgagtataatctatgccttgcgtgaggtttgagaccagtcaggaacgcctctttccttccccgcgtcatatagcggagcctcggttcaacggttttatcacagaaggacccagccctaatgtgattatagtgtgcactgaaaacatagggctcgggaaacaccagtcctagatctcaatctactttcggcatccggcagtggggtccagaagcacaaaagtccataataacattgtattacaggataatatcggtttaattagcctaggcatacatgtgctacagcctacaccggcattcctccagttccccagttcaacctaaacatccctgttggtacaagatggacaggcaaggatctccatgcaagtttgttcttgtgatcctaccgagctgtaggggctgatcacttcgcaggcagcctcggagagtgccggtctcctatctcaggcatatccaagcagacttttttttttaattaaaaaagggaagtgaaacgtatcagactacaaactcacactgtgtcggggatgcgagacgaagctgaagaatgtgagtatccggcagtcaccgcacccttacgttatgtctgtcggagagttgcattgtctcagggcggggtatatccattgtgcctggtatgtgcatattatcaccctggtagtacgtactgctccatacggacgaagtacatcgaatcgaatcgaccgagtataataagcaattctcgcttggtattgtcgcacatgattacttttcctgccgttatggtgactcgtcacacacatattctaatattcacgtcgtctgtagtccacgcttcctatctagtaagtggaccttagtctgcagctagcatgattcgaaacaagggagacgaccgaggggaaagccaaaaacagtttcattctatttcagagtacggagtagaatataccgctagttgtagtgtgtatcgaagtgtaaagtggactcctgatgatcttatagtctagaacgtggactccggtcctctgtaatgagaactctcctccattatgcatacatatgtaatattgtacctgcgtagtgcggcacttgatattcttaattacttatatagctctctgctccgtccacgggtccactactgcgtactaggatcccctttcgagaggtctaacaagcacgttcccccggcggttcgcgtttcgtgtccatgatcgtcatcacgcaccgtactccgtactccgtacctttttatatctaggcctaaaccgtcttcttcttcgtcagatttgtgtcagaaaatacgccccgagattggagtgtcgtcgactgtcagatctattctttaagtttttttgtcgcaattttgaaacaaagagatcaaacagacgcgtttctggaatatactgagaatatactccgtactgataattaattaaagatgataaatagtaaatgtagctagccctagaatataatgacaatgacataggtgtagagtcaaggtttagggacacgttctggaaaaggagggaaaaggagcgaatccgaaaatttttagtacccatcttcattcgcatggttcgccctatcacgaacaccttcctattcatgcctcccgaagatcgacagctccaattcccgtgaaagatggaagctggtccccgacttcgggagtcatgtacgtactccatacctttaaaagccaattgcaactgtggtcttccgttttcccgctagacggccataaattctaatggtagtttagtatcgggtaacgcgctatcaacgtagactgggcatcatcccacggtcgcctatctcggtcaagcatgtaaatatgtatgcgcccgaactaccgtgtggagaatggatcaatctaatattccaagggtgtaactacaggggtgattgatatctaccataatggaggctgaatatctcaaactatattccattccattggagggagataggcgggttgattgtccttattagatgctaccatgtgcgacgatcccggggtttcgatcctgatgtaacctagcgttggccgttgaattaagtacatgataactaactagttagggcatgacagggatcagcggtgttgacattacggacaggggactcctttcatgttgctaggcattttgtgatacatgtgactcccaagggccaaggttgggctcttcgaatgaccaaatatgagacaaggaatagagactattggaaatagtcgattatccttctttctttgagcacccgtgctctagttatgcatcataagttgcatacaaagcattggaaatataggagtatgttgtattgaaatattgaagccggcactaagctcattacgataagtgatatcaagccaaatctataacgccagtcctttgtctttcgagcccagatttcacgagtccactcaattctaagtcccatgttagctttggtcttctagacaaagggtgaaatgcccaccgctcgatcatgagatctagttgacagttcattcgaggttcggttatctccctctttgttaccagattctcggagcttcggtcctggttgagagtgatggccaactctaaacgagtcgtggttactccgtacttcacttagcaactccagtggtcttgtcaccaccgacattggcagcaatgccgagctcactgataacatccgtctcggagcgcttcgcaactccggtggtctccgcgccaccgacattgatggcagcacccagcttgccgatcagatcagagctagagtcatcgtcgtcactgccaccgccgtgaccaccgccgccatcgccacgcttagcgacaccggcagtcttatcaccgccgatgttaacagcaacgccagcatcaccgatcacatcgttctgtttggggacggggactgcgagtgctgtgactgctaacaggatgggagcgatgagagtgtagcgcattctgatatgggttcagactggaatggtcgttagaactgcttgagctgggctctggtaggtttgtgctcacttatggtagagaaggtacgtttgaactggactattcttaactggacttggagtgaatagaggtaatctggctagcaacatccctaggcagatgagcaggctatttaagtatatattgtactatcgtacatgatatctggatagatgtttgcggcatgatagctgatgtgcttcaggattaagcaccagcttagactgtattctacttggacgaggtggatgtagacttgatctatgacatatgcgtagttgcgatgggtggatgcccaataagggctacggattagcagtgggaagactggaaacggtgaaggtcctagtcctagtaattggccttgtgttcaacatagaggtatgcgatgatcgtggcaaagacaacaacaatgatggagagaaatgatccgtcgattgtagtttgacgatccttgacttatttgggtagtgacccccaaaacgatgcctgcccttgatatcatcggtgaactcgatgctacgctgcacctggatttctctaaatttcaggttttgttcctttgttttcgttttttttttgcaaagtgagtcattttggtagaatcaggctacaggatattttataataaactacatttgaatatcgtaataatctaatagagcccaagacgtcaagccctaacgtgtcccgtcaagcttaacgaaaataaagttatccatccataagagcaggaaccttggcatatcgaaaacgttggaattcttctagaatcttcgaagtattgtttttcccctcgattgcctgactctacctagaatatacctcggtcccactaactaggtggtacccatttttccatgtcgatatagtggctttcaatggtgtcttacgatctcccctacgtactctctatacctttctaggatctcgaaccttgaacctcgatccgggtactccgtacggagtaaataattacgtgtgcatcctgagattgtctgaaaagtccaaatcccaaatcccaaattcgatctccgatacgtactttgtcctacgccaccgatcagactaaatgtccaaaagtagcacggagttccgtcgagtgcagcaatctcacctcaaccgctaaaagactcctgccaaaaacatgccctaatagacgagatatagcccccaatgcgacgctggcaactgcatgagacacgggcccctcggatcctccacgcctacaccatacacctgctaccacatgcagttggggcacgtctaattcactagccaagcagctagacaccttctggtatagctgctcggtgctccgtagggatgacaggggtcaatcccaccagtgaccgcacgtgcaaatccaacatttccgggcctgcgcaagccatgtctcagatggctgaaccgttttgctagctaaggaattatctccaccggaattccgaggggagttggggccctgccagattcgtgttaccgaatatggagttgcatgttcggtagattaattcgatgcaggtgctgcgcttgggcctggcgtgggtttctttttaatctattttatgcccctgccatcttctttttggtgctgggtgcgccgtgattgggtggttcttttgttactgaggctttttagatctgtcaatgccggtatttgaccgttccttgtggtgttcgcatatcggctttacataccttagtgggcacggagtagtacttggtgtggtatcttggttaattgcaagggacctttgttcgataatgtacagggttggctttttttatttttctagattttgtagactcataacgatcaaggctaataattacacatggcttgaagtgcattggggtaaatgtatcaattgcagttcaaatggccccttgccagacgcctggatgagaaaatggaaatagaactttgaatagtaacagaaagagtagtggtaatgaggcagaattcactcttgcatctccgtgtcctcggtagttttcgaaggctcgccgaacagttcgtcgtcgtcgttgtcttcagtgacaaccttttcggcttgcacttcttgttgcacctcttgctgcacttcttcttcctcgtcctcgtcctcgtcatcgtcggcaatacgacgagacgccttgccacgacgacgcggcgcagcttcttcagcaggctcgtcatcgtcaccaaacagctcgtccttgtcttccccagcagaccgagcagcctcttcatcgtcagagtcaacaaccatctcactgctcttatacttgccaggcttctcagacttggcagcctgggccttcccgcccggtcggcgttccaagcggcgtcgcttcttaggcgccgcttcgccctcgctctcagccgcgctgtgcacagcatcggcttcttcttcatccgcgataaaatcatccccacccttctttttgcgcttgctggtaggcttcttcttgcgcttgacccggtcaccggtctcggagtcgttggtcaattccgcctcctcacgagcgcgctcgtcttcagcgcgctgcatggcatgtcgttgcacctcttcgaccatctgcgcgcgttcctcggcgatacgcttcttacgctccatctcgacctcctgggccttgcgcagctcctcttcccggatccgcgcggcttcttcgcgggcttcacgggcttgctgaagcttcgcggcattcttctcttcgtactccttctggctctgcatggctcggtcaagctgcttgctgatggtgcggcccatgttggctcgctgctccaaagcggcgctggggtaaggcgggttctcctccttggaaagacgctcgaaggtttcaatggcctccttgagaccctccgctgcctcttggacatcctggagcgtcttctgggtaggctgcagaccgtacgcgagcgaggcgatttggttctgcacgaaagcaacgttgaattgcaggtgaagttgatccggagagacgtcgcgtgcgcgcgtggcgtagtcgagtgctgtcttcattgcggccaagtttgcctcctgcttgcctcgtagccaccatacacgaccaagacaagccaagatttgcacatcacgctggcgatccttcgacaacgcagcctcgtagtgttcaattgaccgtgagaactgacggagctcagcgaagacatgtcccaagttgaggtaaacgctggggtccttgaccgtatcgcgaaccttggacaggatttggacagcagagctgtggtctttcttgtcatcgaccagggcgatcgcaataccttgggccgcatatgcgttcttgggatctagctggagagccttgtcgaagaactccacagcacgctggtaaatcttgcgacgcttttccttgtcttgatctgtgtcgcggcgcatgtcacgggcagcgaggagatgaacattgcccattccagtcaacgcgtagcgatcatgtttgtcatagtactgcaacgtgtgcttgaaatggcgttgctcgctatcttcagcaaggttggcaactcgtttcttcgccttgctaagataccatccgtagagtgcccgaacttccagattcgtgctgtccgcttcgtaaagcttgccaatcttcttagggccctcgtctgtggggctctggcgaagggcaatatatgtaatacgtgcattagcttccgtgtagtcagagtgacgctccagaagaccttcgtagaccttcttagcttcgtcccacatgtcggctgcctcgtaagtccgtccaaggttgtagctaattgtggtgacgagcgcatcggtatccgtgccatcctctttttccttggactgcacgcaggcgttaagtgcagactggaacaagccacgagctagagcaatcttctcgctctggtataggaagcagcccatgttgttgaggagctgcggcgggagactctccctaagagcagcgttcatctgatcctggtcctcgatgtcaggtcgagcatcttccggaatttcagcaatctggatctgttccagttgggtcaggcactgcatgctcttatcaggagctgtgccctcgtagagacgggaaagataaacaagaaccgactcgtcgggggagatattttgtttctcgtccttccacatagagcgcactgactcaagcaaagtgatggctcgctttgcctcagtcgacttgtcttccttgctgcctgatttctgagcagcgaatacttcttccgcgtgaatagcagcaaggaggatcatggcctccgggttcttcgattgctgaacaatcttctctagtttgaatttggcaccgtcaaagtccttgttcgcgatctgcatttgcacagcgccgaatttggcgggaagataacccttgtcgactccaccgcgggcttgatcggaacggttgtagtactccgtggcatgggcatcgtcgccttcatagtgcgacttgcgaccgaggaggtaccagccgtcactggcaatagacataacatctgtgtgctcgatggctttgcgtgccaatgtctcgacggtgggatatgatttgcggaggaggaagtagctggcaaacagggagcaggtcatcgggtattccttgtccagcttgaatgccttctgggtgtattgagtcatggctaatttgtacattgacccaaacatagggtcggtggtggctcggcgagagctgtcgtggaggtagtaaactgccagcaggacgttggcaaccttggactcggggttctgcatagcgatgacggttagttatggtgaaaaataaaaccttgcggaactccctctcgcataccagagacaaagatctctcccaagctaccttggcttgatccttgaagcccagctgccacaagcaacatcctagaccaatacgagggtcaggatctgtgaggttaggcatcttgatcagagccttttggtatccttctagtgcatctgcgtatcttcctagcatgtaatgcgcgcgggcacgtcccagaatagccatgatgttccggccaccaaaggccttggatgactcgtcgaagcatttcagagcctgccgcagcgactcgactctttccgaggtatcaatcgcacctggacgaacagcacggggcgggtatagtgatgcacggaggagacacaagacaccacgcgccaggaagagaggaggataagccgggttgagtcgcgaagcctcgttcaacgtcgacgtcgcaagttggaggtagtgatctttggtcttggattccgagtatagttccccttcgggcgcaactcgaggggcatgtcggctctttaacagcagcatccagcagatccagcccagcaggccgagtttctcctttgtcgctccgtgggcgacggaggccagacccttagtcaagatgtcgatggcatggtcgatctgctttcgcttcgcgtaagcgagcgcaataatcacccagaaattcttggccgctttttcgttctccaagagggtgcaaagctcagtcgggtcatcggggagctcgagcaagctgacttcgacttcgctgtcgaagctggacgcgggaatatcgatagcatcggggatatcggagaagcgcaagctgctcaatgggctagctgcaggtacagcatcaccgttcaggccattggtttggccattctcaagaggcgccatgatgagtccgggaacgggagggatgaggccactttgcgagtcggtatgggattataggagcctcaactcatgatcaagcgaggcgatccatcaaaaaaggtcagaatcaggagcgttaaggttagcgaccctgagtttggagaaaacgcgaaaaattgactctcggagacaacagcgcggcgatgagaggtgagaattgaacgattggagtggctgggctgcaccgccacaggacgccacaccgcatacaataaacaacacaacaccttttggacaattgaatgatcactttccgatgttttcgaaatgaataagagcaaaataagtggagaaaatggcatttactaaatttactagtagaatacctaggtgcggtattcatccctgcacccagcttgttacaaatttgcaaagcaaagcaacactgagcagcaccccgaagataagaccaagctcactccagtggcgcaggcgaccataggactcaacatatccagctgtagcagcaaccagctggccatctattgcattatcggctttgatcgaaccggccaactcggatgggaaccggcccgtttcgaagtactgatccataagttgatccttctcggcccagcgtgctgtaagccagtcctcaaactccttctggtcatcaagaggaatctccgagacgttgaagcgtctccaatgcatgttgactgaggtcggcggtcgtccttgcagatatgtggagcgaagagtgaagtatttatcgggatagcttccctttctatagacggacttgtgaatatcgttctactggaatatagggagagggaaacatacggtggcccttcataggctatggtgcagtcatacacccagtctacggttccccgcaactgctgaagacagaacaacagccctgtagaccgcggaagaatcacgtgcttgaatgaaggcagtccctgtttctgcccccaaatgtcgctgcgtctcttggtattggtggacaggtttgtcccctcggggaagattagcagccacatgggatcgtactgcgggcgggctgagttggagcccccgtagacagtcttcaacttctgcaaacgatgctcaagccttggcttgtcagacgtccacttgcgagccatgaagataaaaccgtagaacatcatgcccgtgcccaccaatgggatatacttaagcgactctttcaggatgatgaagaggcggccatgcatctggttggtgtatgcaacccaccaaaggtaaacccagtcagtgtagacctggtggttcgagatcagaacgagacgctcggggaacctggtctccagtaatccatctttcgatagatggatctgcccacgcacgctagcatcaccactgacccggaagagcgtcggagagctccattcggtaagagcagcgaggaccagtccgaagctttgttttgtatatgccatatacgaatagtagtaacgtttgttgatcagatacagcggggagccgattacttgtgtcacgcagatcgctataatacagcaatccacccatgtcatcagcagaagtgaacgcagtaactgcatgggaatgccatgtttgagacggggatcggaaggtggtttggtcgagagctgctgaagatccccgagatttgcggtcggcggcttgcgctgtcgaacctcggcagactccatggtagaagttcggaggttcggagatccctgttgttttagagactgacaaatgaggtagaaattcaagtaatagactggaagctagtgaatgcttctacagctgtacagagcccggtctggtcggatgtggagaatcgagatagtgatgatcgatagtatgggctgcaacaaagctagacagaagctaggaaatgaaataaattgccattcccttgaggaaagaaggggattataataaaagcgattgttaaatcaaaagagataagtgttggggagctgaacagttggagagttgaatagttggaggggaaaatcaggcggatctggtggatccaaaatgacggtcacagcctcataacgtcacctgagtttcttattatttactttgacacctttttctttgtgattcatccaattctctgagatcccggagctatacaacttaaaatcaactgttgtgtcaggtcattatacgccagttcctacttcgggctgaaagatggcgcgttgatgtgagcaccgaccaactcgaatcctcattggagtcctccgggctgatacatatgactagggtcgataggcctgcgattcttcttacaacatgctctgtgccatcatccgcagaagctcgcgcaggagttcccgtctcgccttgcgccagcatttttccacgtctcaaccacgtcacgaggtcaaagacatcggctctttgtctcagcgcctaatacccaaataccaaggtgtggcttggagctgtcttattggagcggtcttattttgttggtaggaagactaatatattctcagaatcttgtgacggagagctgctgtgtctccagtggccagcaccgccgcgaaatatcttcttggtgcgcaaagattgcgccccggcggttacagattccctgattgaattcgtcaagtaagatcgagagatgcccacgggaagcgacttgactcaaggctgacatctacgagccatgtttcctctacatacccatctatctcggtgatcctcgagtcaaagactgccgccgaagtacattcgtcgctctcttttcccgtatactcggtttctctcgacgaaaaaacgaccgcccttcatgataaagtcgacctcacggtgaccctgggaggcgacggtacgattctacatgcggcgtcgcttttcgcgacctgctcaaacgttccacccgttctatcatttagcatgggtacattaggcttcctgggtgagtggaagttctcagagtttaaacgtgctttccgagaagtctacatgtctggtgccggggcaggtgctcgcacacctgtgttagaaggcccagaagcgacagtcacacaagaaattgagatgggcccgaccgggtggtcttccgtccggggaaaatcaatgggctctacgcgcggggcacgcattctgatgcgcaatcggttgaaggtaggactgtttactgccgacgggaccgaaacgacgcctatccgaaccaaaaccgaccagggtcagggagtgtatgtgatgaatgagctgctcattcaccgtggcaaagaaccgcacttggctgtggtagatgtgtttgtgggtgggcggttcctgactgaagctgtggccgatggaatcataatttccacaccgaccggaagtacagcctacagcctgagtagcggtggtagtattgtgcatccgctagtcccagccatccttctaacgccgatctgcgcgcgtagcctcagcttccggccattggttctcccttccagcgcccccatcacgctgcggctaagcgaaaagaaccgtggacgcgaactcgaggtcagtctagatggtgtcaatttaggccaagggatgggagttggtatggaagtccgagtctggaatgaggagatgcgtcatgggaagaatgagtggcagggcggtgtccccagcgtgatgcgacggagtgtgggaggtgaagcgcatgagggctgggtaggtggattgaatggattattgaaattcaaccatccatttggcgaggtataacattgtacgataatataggatagaataagaagatcaaacacgaccccgtacaaattatatcaagtggaagaccgtggatccaatctccttaggagctgatgtgattggcagaggcttgttttctgtagatgaacttcccaagtactctcggccctatctcaggggacatctcttccccccctttccctcttcattcttccccaacactcaacttgcgattcttttattgattctttgaagtctgatatcgcgttgcttattcttgagcatcctcgcagtgcgaggaccgctcctcatttctagacaaacaggtacctattctacccctccttcgattccctcgatactactctactctctcgttatcccgggaagtgagtgtgttcgagtgattctctcgacaaagagaaaatccctgaattgtttttttttagggcatcctctccctgaatgcagttgctaattcctgtctagtaactagcgctagccggtcttaggcctcaggaggtctcggcgcattcgtttacccatactccctcccgccccctgcgcgacctgggaaatcccttgaacaatgacttcgtatgggaagtacgtagtcgcaccatctatccttggaaccccgaatctggtggaattttactcaccctccatagcaacatgtacgcgccggagcagttcatgaatccggggccagccccccgaccccctaccgatcgaccccccaagttgactctacccaccaacagcacaacatcctcctttggtcagatgagctcggactctccgatcacaccgggtctgtcgtcggcaaatctctcgcttttccccaacaccagcagtccctcgctggctgtgacccggagtaacactacccaaaatggaatctccattatcaaagaaggcaccgtccgctgcaaagaggacaagttcttggccacttggaatacgcgttacttgatcctgcgcgaattcaaactcgagtttttaaagagcgattccggcaaggtagtgattaccttccctttgtccacggtcaccgctgtcgctcgctccgaggattcgaagatggcctttgaggtcactcgcctggccaacccgaaggatgcaaactccaaaaccgccctccttgctcgagacctacctaccaagaccatcacctgcgaagtcaaatcggacgatgaaatctacgagtggatcgacaagatctacgagcgctgccctggcatgggcggcgtcagcaatccgacaaacttcagtcaccgtgttcacgtcggctttgaccccaacactggcgcctttgtaggcttgcctccagagtgggagaagctgttgacatcctcggctatcaccaaggaagactacaagaagaaccctcaggctgtcatcgaggttctcgaattctactcagacatcaagatgcgtgagcagaacccgcaatactatgctgggatcaactcttcgcccaatggtcaacccaaggcatacggtagtagtgttggaagctccattgcacccccacgtcctgccccaccaggacctatgcagcgccttgatagcagtcagtcgaaacaatctgaaggttctatgcgctctgcgtcatcttccgtcggacaggcggaccgtgcggcagaccaccaacagcaagttgaccggatgaaggaaatagccgatcaagagcgtcgccgcgtggaggaggaacgtcgcaacaaggaggagcaagatgcttacaacgcatccatcccgaagggccgtcctactatggctcaacaggagcttggtggttatggcggcgacgactcgtcacagaatagccgctatcaaccaagccgtccagcccctcaggctccaggctctgctgctcgccagcaagaccgacagctcaccgcacagcgtcccgcacccgcgccaccgtcgcagagtccttacggccaaagcgcagcaccgggcgctcctcgaaccgatgaccagcagggctctccaagctcccgcagtgaccctcgggccccaggctctgccaaccgtccccagcagaacggttctaaggccggaccccctccgacacgcctaccggcccccgttcaagctgtgaagccgttgaatattgccaacaagcaaaacgggaccaagaacgtccccgatggcgttcgcctagccgaagccgctcttacgaagaaggcagagccgcggaaggaggtgcgcatgtcaggcatgtcagagaacgaagtcatggagcggctgaggtctgtcgtatccaaggataacccgaacgagtcttacagcaagcagcgcaagattggtcagggtgcatctggatccgtttatgtggcacgggttaaggaaaccgcacctactggtgttgcccacgagctttaccggacgtatggcccgcgctgccaggtggccatcaagcagatggacctgcgcagtcagcccaggaaggagttgatcgtcaacgaaatcattgtcatgaaggacagccagcacccgaatattgtcaacttccttgactcattcttacaggaatcaagcaatgaactctgggttgtcatggagttcatggagggtggcgcgttgaccgatgtgattgataataacccagtaattactgaaggtcagatcgcgactatttgtttcgaggtatgttttctatccaatgttgttttttatccaattactgacgtttttaccaaaagacttgcaagggtctggcccatctgcacaaccagagcatcattcaccgtgatatcaagagtgacaacgttctcctcgaccgcgttggccatgtcaagatcactgatttcggcttctgtgccaagctcaccgaacacaagagcaagcgcgctaccatggtcggaaccccttactggatggcacccgaggtggtcaagcagaaagagtacggcccgaaggtcgactgctggtcgctgggtatcatggccattgagatgatcgagtcggagcctccttacctaaacgaagagcccctgaaggccctctaccttattgccaccaacggaaccccccgtctgaagaagcccgagaagctcagcaaggagctcaaggctttcctgagcgtctgcctctgcgtcaatgtccacagccgcgcttctgccgacgagctccttgctcatgaattcctgcagactggatgcagcctcgctagtctagctgagctgctccgctggaagaaggctactagctagtaaataactgctcttcacctgcacaacttgaagcaacatctggatcccatttacgcgcgtcctcaatttccattcacgcgcgccttcgatttccattctcacaggaaccactcttcccgtgtgttcttttcccgtcttcttcactgcactctgcattgcagatatcattgcggctctgttctctttacttaccatacaaccctgggcgtggataatctggcgtttgatctgttttttctttttcccctgtccaacttcttttcgatgcttgcacaaacacataccatgtttccccctatgacgttcacgattttgcaacttgcactgtatcatgtgcccttgcacaaaagcgaagaatagtttaaaatccgatgtgactttgacttgatttctttattaaaaagaatcaccgtttacgtgcattgggccctggtgtatgtaaccttgggctctttgtgccgtactcagccagttgtccaaaaggatatcaaacaaatacatgtcttcacataaccttacggggtcaatttcatacatggttcatcgcctatctgactccatatcacgaacaacactaatcgggtacttatgcctctgtccttgacaagacaatggggcttaggataatctaaataccgttgtatcgagattgatatcagagaccactaccataccatttttaatgtcaaatattttattgaagcccgccttgagactaccctcgagttaactgagagaggccgcaaatgcgaccaattatccttggatgtaatatgtcattgacaagcgtaagtaaaacgagtatataaaaattcatatagaagacataaggaacgaaagggaaccaagacctccaatatctcctccatccaaaaaaattcagttcaactcctccctcacaactgtaccgtacaaaccttgctaaacaagactccaacaagatcactctcgtcctcagaagccgtccaacggcccccatccacaagcctctgtttccaaatactctgctcagacgcagacagatcctcccaagcttgcagcatctcctcctcgaactgctcggactcgtccgcagatagagaagcagcagtctcaataatcacactctgctcagcatcttgcccttcaccgcaccgaacgatgacagagatggactgcggagcgagggtttccaggtcagcgggtgcggcaccggcgcggtgaacgcggtccaggatctcgcggagggattcaatctgcgagtctgtgggaccgaaggtcgccactgggatatcggtatcactgccgcttgcgcgcggcgcaagaagtgtatcgaaatatgtcagcttatcccgtgggggtatgacgtattcccttgcgatggctccgcggatgctgtctgggagccattctgtcgcaccgaggacaggcggggtaccgccgcggatctcggcgaaggcaagcattgctacgcagattgcagatattgagaatagtaggatgatgatgctgtatactagttcccagatttcggcggggcctggggtgacgaggacgtagcgtggggtgcgggaggaagttgggaagggggatagtgggaatgtgtgtacgacgactgtgttgcccatgctgacagaggcgagctttatgttctgcgggccgacgtctggggttacggggtgtgccggcgcgatgaaggtggagaaggtgagttttgtcattgagaatgggtgcacgtcgcggagggttgtataggggcggaaagtactgtagccgcggtttggtccgtattccaaggtaaatatagggatggaattgtcgctgccgctggctgcgataaccgtttgttgttggccttgcgggtttgttccgagttggcagatatcgattcctaggccgatcttcactgttcgagggagcttgcgacgtcgtagaattttggacttgctcgatttggcattagggagttgaaggaggacgagctcgctaccaccgcgatttggagcattttggaggagaagcagggttctaggcgagaggaatcgtagcgcgcggaacttgggacgtgctgtgcgggctccactagcgggcagaggaatagtataaatggagcggacctcgggggagctgttagaggagatctcgccaaccatgacgtctgagccggtggtatatgccacaaggaaccggccgtgtgcatcatcggtcttgcccaagtcgtcttcgagcttgacaaagtccaggtcctcggcctcttcattgccgcttaattggatgcggccaatgatatccttctcactgggcgtctctgtgacgcggaagaacacaatctcgccggacggtgccatacccgttgcaacggctccgatccgtgcgtgtttctcagcgccatccttccctttcggccacggcgagagtctcgtcactcgctgatatgtatctgaaggacctggcccattcttccctcggaagagtgatgcttgcgacaaagctatagccttgccgggaataacctcttccttagacttggtgtcctttttcgcctcatccttctcgctgtcttcggcgctttgtgtggtcttccgtggggcctcaaaccggaatgagcgaaggtgctgattgttattctttttctgttgctccacagagctatttataccggccagagcaacaagcgagcccgcctcgtcgctggccagcggggccgcagccagcgaggttaccgagtcttcatcgcgtgataggttcaattcgacgacttcagtgatctcatttcgatgtgacgtgtcaagcagagactgtacataaaacaacgattagcatttgcagagggaggatattctcgaaatggtgaacttgcgatcttgtttccaactccactacgcccctcgccgcctccgccaccgactaggagtcgaccgttgttgcgcgggtcaaagtccgcagcgaagagcggacacgagagtgtcaatttagcggagtatacggtgggcgccattgttgtcgacaaaacagagtgtaaagaggacagatgggatgacggaggtgccccggattcttggcgcggtaacccgggattgccgcgcgaaaactatattgtatagatctacaaagataggactactactctattttagttggtatgggaagaagatgagacgaaaaaaaagtaaatagtattttatcatgcactctaagcattttaagcctcgacttcttgagaagtgaactcgggcaggcgcttgcggatatcctcccatgtctcgtcaccctcaacaagtgacttgacagcctgcaggatgtcatcctcgctggcacggacctgcttggtggtatcgcggtcgcgcagggtgaaggtgttgtcttgaacggactggaaatccacggtaataccgaagggtgtgcccaactcgtcgttgcgagagtaacgcttgccgatactggcggaagagtcatcgacacggttggagacaccggccttgcgcagcttcgaagtcagacgctgggtcagaggcttgaaggaggcgtgggtggagagaggaaccagcaggaccttagtgggggcaactgcgggagggaaagaaaggacctatagagtatcagtaccagcgttcatgtgaaaagaatgcaaaaaggaaggcttacaccacgggtttcgtcaccggcacgggaccagtaggagtgctcaatgatactgtaaagaatacgtccaataccgaaggacggctcgatcacattgggggtgtactcgcggacattctcaacgcgagtgcgcttctcaatcttgatcagatccttttcgatctcaaccttgccagatccaacaccctcaacatcgacctcaatcttgccgtccttctcgaggtcaagagacagcttctcgcgcagctcctgggacagagcctcaacagccgcctcgacagtcttggcgtccttcttgaatcgagggccaaacttcttcttctcaagttcaatctggtactcctcgatacgcagaggctcagcacgggcttggcgcaccacaagaggggcaccggtcttctcccggtggacagtcagatcataagcggagcggtcagcacaaccgacacactcaatccagccgtagctggtcagcaactcggcatcccagcagtcagtagcgtagtgagccatctcattggccatgtgctgacggaagcgcagcttggtagggtcaacacccagcttcaacaggaaggactgaatgcgggccaagaaatagcccaaagtctcgttgtcgaccaggccagtttcaacagccttgccgatggtcattttggttagctttgtgcttccggacagctgcacgttacggtcaagcaaggtcagctcagtatccttgacctcatcgaagcgagcgtgcttcttgccaccctctgggtcgacgtagtgctcaatctcggccatgaggaactcgcgcacacgcaggagaccggcgcggggagagatctcgttacggaaggacttgccaatggaggcagaggcgaacggcatcgactgctggttgaactccaggagcttggcgaagttcaggaattgaccctgggcggtctcaggacgcaggtaaccgggcatgttggcgctagggccaatagtggtctggaacatgaggttgaaggagactggaggcaacacctcgccgccggtgacggggttgcgaatgtcgtgcttcttgatgagctgctccagctcggggccaccgtagttgtcaatttgtgcgagggtctcctcgtactccttgaccagagcatcatccagcttcttagcctcggtgcccttggcctttctcttcttcttggcctccttctcctcgtccaccacaactttctcgccgcgcgcctgtttgtctcccttgaggcgggcctcgagcacctcctcaaccaagtggtcagcacggaagatctcgccagtcttagggtccttgcacatccagtcggcgaacttgtccacgtgcccactggtcttgagaatctcgtggggggtcaacatggtggtgtcgacctcgagcatgtcctcctcgagcacgaagtgcttgcgccacaagtcggtcatgttggcgatcaaggcggttccaggtgggccatagtcatacagaccagatacaccaccgtaaatttcgaaggagggggtgtagaacatgcgacggcggagcatggagtccagcaccgtgcggtcgatagactggccggtcttggtgttgacggtggccatcttgacgtttcgtttcaagctcttcgggggaggggtgtaattcctgaactgagtccgaatgagagacggaggggaaagaaaagagcggggtggaaatcgcaggcgcggcaattgagtcatccactacgcaccagggcaaccctcaggcaccaccgagaggacaaaagacaaggagtatagaacgagacagaacgaccaattgggtcggtctttttctttttctttttatttattttccttctaaaaaggaggtctccggggtcgaatcgcagattatcgctccggggaaacgattgtccgaaataatttatttctcgacgatctttacattttccattgccttcaacagcagcactttaccctctcagctttcaaaaatgggtgtccctggccgatctggaccgcctccgggcgttatgggagatattaaaaccggcaacaagctgcgccggaagatgaaccatgtcaagcgcaagagagccaaagatgctgcgcgccgagaagagcgctacgctttcaagaaagaagaagccaagaacccccagttgaaggaagagcgacttcgccgcaacattcctctgactctcgagcggaaacgtgtctggaacgaagccgacaacgacaccgaagaaactggtctgggattgagcattgacgttgagcgcatcaagcgcgccaagaaagaagaagaagacgagctcaatcggccattggaagagggcgaggatgacagcgaggctccggaatcagacgctgagtcggtcgacagtatgctggagtcagacaacgaagaagatgaagatgaagatgaggacgaagaaaagggcgaagacaaagatggcagccgcggccggaagaaggcctctatccgaactgcgacagagcgtgccacaagtcctacgcagtcaacacgcagcacaaacctcagcctcgctcctgaagcattggccgccaaattccctacacttttcaccgagggacctccacccaccccgaaaatccttatcactaccggcctcaactccaccctccacgaccaagccgaaaccctgaccgagatgttcccgaacagcgtgtatatccggcgtaatgcccaccggtactcgcacaaattctcagtccgtgagatttccaaattcgcggcaaaccgtaatttcaccacagtcatcgtgttgaatgaagaccagaagcgaccctctgggctaacgatggtgcatttgccagtcggcccgactttccacttcaccatcagcaactggatcgacggaaagcggcttccaggacacggccgagccaccgagcactggcccgagctgatcctcaataacttccgtactcctctgggtcttctgactgcccatttgttccgcacacttttcccgccccagccggatttcgaaggccgacaggttgtcactttgcataaccagcgtgattacattttcgtccgtcgtcaccgctacgtcttccgtgagaagcgtgagactgagaaggctgtcgtcggtgctgacggcaaggaaatggtgggtgctgagggtatccgtaccggtctacaggaactaggacctcgcttcaccttgaagctgcgtcgtgttgataagggcatccagcgtgccagtggccaggaatgggaatggaagggtggaatggagaagacgagaactctgttccaactgtaaatgtctctttatgttgttattcggttttgcatggggttcgagggagttatatccaaaagcttgtctggtttcattgcaatggactaaatttacttataaaccaccatgaactttatactctgaaggtcataagaggccacgtcggctctggattggttacttgcacaaatacattcattggctatccatacccaactccctaaaagtacgaagatggccaataatattttgtcacatgacatggcgttgctaacatctttgattcattcaagttgtccatccaagtgaccaacgagatgcattcgatggattcgaacattgacctacccaccgttgcggagattgaggcttcgactgatatcctcagtatacgaaccaattccattaaagtggttcgactgcgagaacgcttcgcggtcaagattggatacgcgattccgcctgtagaggcagagaacataaaatttgtcgcggccaacagcatggtttccgtgccaaaggtctatgccaactttgtcgatccagagaaccagaagagatatatcattatggatttcatccctggggccggcttgcaaaaactacacccgtcgctcatcccagccgagaagacggttagcaagcggatcaaagagaccttcgacgaattacgagcaataccatcaccggttggaaacttgaatggcatgccttacctcgacggtgttttggcaacgccagataacaacccagtgatttctgggccattcacaaatcaagaacagatgaatcagggaatattgaaaaggctgggccaaacgcaatcaccgcaccacactcgcttagtgcaaggaatggccgaccgaaccctcaaggaccatcgaattgtttttacccatggagatctgcagcggaagaacgtaatggtggagcgaacggtcaacaataatggagatgcagacttcaaagtgactcttattgactggaatttgtcgggctggtatcccgagttttgggatttctgcaattcgacaatatattgtcaacggaaaccagattgggttgagctcattccagacatatttgatcagtacccgttggaatatctcatgatgcaacttgtctactcgatggtcttttactgatgaacttaaattgcatcaaataacaaatcaagtcttgatcgtcaaaatagagtccgaggaactatataaacatccactgatggagataaacaattccttatccccgatatcagccaaccttggaagtcacgagacgatctcctgcaactgagccaatgacaatagaaaaaaaaaaaaagaatactaaacaaagtacatcatacccaaacaccctccctccctagaaatatggatatcctcccccggcgcctcatcttcatagcctcaataggcaatccaaagccctactacaacacccgccacagcgccggacacctcctcctcgatgccctaaaacccctcctcgaagtcaccctcccaaacacaggcctctaccacgaaacatggcaaagcccaacacaaatgaacataacaggcccgaaactcgtgcgccgactagaacaatgggcaagcgagcgcgccagccgacttgaacgaatcgccagcgttgccgcaacacgtgcctcgtcgtcttcgtcttcaacaaccccaaccccaaacaacctccccgcacaaaccacctacccaacaaccctcatcatcctccacgatgagctctccatcgccatgggcaaggtccgcatcatacgcggcgggcctgaggagtttagtctgcgcggccatcgcgggctcgtcagtatctgtgagacgctgcgcaagaaggggttgtatccccgctcgtcgggtgcgaaaaagacgggcaccgggccgttggcggatctctccatcttgcgcgttggcattggtattggtcgtccgtcgtcacatgatacgggtgctgtttcggactatgtgcttgcgactgttaccgataaggagcttaaggcttatcaggccgctgcgatgccggtggtggggactattcgggatgagcttttcagacctgcagggaaggtctgatgtgccaatgtgcagagtgcttatggcccctcatgattggttatatgcgcagcgaaggcatggaagtgaagaaagtaatgaagagcaatgtcaaagttggctcgtggatgtattaaccatatacatagaaaacgcctggttgaaaacaggagatagctgccgatgttttatcgacaaaagcaaagaaaaaaaaagacgccagtctgtggcgcagatctcagcgcagcaaatgaacatccggtattatgctaatagagtagtcgattcaaagaacaactcaaacggttccagctatgctcaaatcgcgaatctcctgcaacacctcctcgacccggttatccagatcacccttggcatactggtcacgagtctcggcatcgagatactgctgcacctgcgccatgcgggaataagcctcggcacagaagcgcagctggatcttgacgagagcttcgaagctggggtcgaggtagggcacacggaggtcgataagctgggggagttcgttgaagagctgctcattcagctgctcgtaggcctgcttggccatctcggcttcgcgctcggtccgcggcagtttggtgacatccttgtctggcttctcggctagcttcttgaccttggcgcgcatggcgtcgtaatccagtagcttgtggttgcgtttcttgatgcattcgttcacgtcggggaagtaggcgcagaatcgggagatggggtcgaggacggtggtactgtggattttgtcagcaccattcatgtgtgctcgttgatgttagtgaaaggatctcttaccggtatggtccatccaatgccttaatggtctcggcatcaagatcctcaacggcttgcttgtagctccggctcacaccgtcttttgttcccgcgtcgccatagaaggcatcaatagtctccgcaatgcgcatttgggacgccgtcatggctaggaaaagtcagccttgaacaagcagatctaacaatccgcagagcaaagggcacccacctcgtagtgaatcaagatacccctttgcctccttctgcaaccgattggcagcagtctccatagtccggtaacgactacaacgagcaacgtcagttccattccagtcccagtataaccatccacagatagcagcaatgacaaccataccgttcctcgatctcataatcgcgatcattcgtcctctcgacatgtcctatacaaccaccaagtcaacacaccattcgcatccacgtgggcgcggcaagtaaatcgtagcgcgtagcgggtatctcaatccgggatcgccctcatctcgattcattgcggggtagaactcgaacaaaactcacccgtcttcatcatcacctgtgtcgtcgcacggttgacatttttcttgaaccctatccatccacacggttagattcgctcacacaggcaccggttcatgagtccgagatgttgtaggataagaggcgtacctgcccaagacatggtggcggtgttagttcggaggatccggagatgaagatcggctttgagttgagtgtgggttataggctgtcagtgggtatgaaatagaagcaagtcgtatatgatggcagttggctgcagtcgagaagaatctccgatgttgaactgtagggaaagtcgtgaaggtcctggacccaatgccaaggtagccaacttggtctgccttacggatgtggctgtgtgtggctgagtgctgatgattatgtcatatcgtccggatgcggacacgtcatgtttggtagggctggagttcgacggagtatccaccagcgttgcaattcaggttctgctaggatctgtagtatctctgtttttttgcagaagatccacgactggtaatacgcggtatatcgtgccaaggtatggatcgaaatattgtatagttaactataggtagtatcgagttgtgacattcctactcagatcgtgtgcatatagccgcttacgctagtaggcgagcattcaagagggagataataataaaacccattttagcataattaccccttaccccttaaacagcgccatagttagtgtaaggctgggtcttgcatccgcgacaatacgcctgcatggcatgtgcatatcgaggtattcctcttatccacttcgtccacttcgcctacgccgtaatgctgatgcctaagtaactgagttatgtgttagttcttggcggacagctgtatgacaatgccaagctcgaacaaatgcattttccgtctgctcgagattttactcgaaatccattttttgggttggttgcttggattgggtatctgggtgaaggaagtcgcatagtccgaatccacctctttagctgcatgtgttgtatattaccgagttccatacggagtaactactccgtacagacccaaggtatgtggataattagaagttataaatgcatgtgtgaataaataatcaaaggttggacggagtacatagaaaaaagtacggagtagtttcaagtctttctctgccgtctaccttgaaaacttagaagttagcaggtagaggatatctataaaacaaatccatactatatcgagccaactggattggtcgtgctcaatggcagaggcggtaaacgcggccaactattctcgtgtgattaactagttagactgcgctagtctacaatatgacacactcgattgcatcagaccgctgggccttcttgtttctcgctagcgtatggaggatgcatgggctattatcgttgatcggaaaaaacctccaggttgaatgatatcactggccctggtgtgttggaaagataccggagctaatctactgcgctgtgcggatcgcctcggtgacacttgtggaccttgcatcgggtcgataaggcgccgatcttcgagttgatgtcataggtttttgtagattgtgaaactcggaggttgagtagagatgcgttttagttgtaagaggggaaataggaccttgaaacgaacctggtatgggataatcgatgtgcaccttgctacgtagaagcaagtcacatataacgggaattcaaaatgcctaagccatatatacaaaaagcgtcgataatatgtactagaaatcgacgtcgaaatgagacgaaaagccaaagcaaaaaggtccagatgacctccagtataggacatcccacttgggtgccgattcctgttcctgatgctgtttcagcagagcctctgcctacaatcatataaacaccagaatccaggatcaacaacccaggtcagaatatacccatcgcccgctaaggctgggttcgtcatagtggtacaagggaagaaagattcaaatgggaatttcccgccaacgccgtagaaactcgaaggtacctgccaaaaaccccgtaacgcgaaaaaaagaccggagatgaaactccgaaagactgtaaaggaaaccggatcaaaagaaaagggtcatgattcttcgttgcattgacgttgaagacatgaggatccagacaagaagacaagctaaaatgtggatcgatgtaatagaggacaggctgaagaggctggagggatacactgtgaatgcgccggagccaaacaggataaaagaaaagaaaggcaaaaaaaaaaaccttcgttaggggcctccttctagtttaggagcattcaaaggattaaaaatcagtaagcctctccttgaatgggtctataataaataaccgccctgtgatgcaaatggaaaataatagtttcggacacatcaaaccttacggtgcgggcctgtgacctcgacacctgacaactgtcgtgttgaaacgatcaaaacccttcctcgccggccttacacagcttgatctggcgcacccattcggatttgaggacctgtgaggcattgatgcggcgagaaggattgggatcaaggatggagtagatcacgttgcgacaacgagcctgagaatttataagtctttgccccggggccgcaggagggggattagctgttcttactcgatgtaacgtctcaatcggagcgtatccatcttcatgtttacgaccgtcaaggtaccgctggtagaactcgtcttcatccttgcgtgccacacgccaaagatgccgcccggtgcgcatggccatgtagatcactccagtcgcccagagatcaaccgctcggggatcgaattctttctcgacgtattcctctggggcaatatagggggcggagccgcagagtccggcggtcatatgggcttccttctcccaggccatacggaagcattcaccattaccaaaatcggtgatcttgagtgctccgtgagtggtcaaaagcaaattttcgggcttgaggtcgcggtgtgcgacacccatttcatgcatatactcgacaccgcgcatcaactgcttaaaaaagcagtcggcttcggcgacttctaatttgccggcagcaaggaccaaggtgtacaggtcgccaccagcgcagtactccatgacttcacagtaatctcccttggcatcttgcaagaggtccaaagtgtgaatgacgttcgggtgacgaagggaagatgagatgcaaaattccgaagtcagacgtttttgatacttcttggtcgtttcttgcggccggcggcggaactccttgacagcatacagctgttcacatttggaatcttgggggtcgaccttgtgcgagatgcgcacgataccgaaggcaccgcggccgacaatctcctggcacttgccgtacttgtcaaccagagacgcggtggcgttcgggccacccttcttatcggcagccagcttatcgcgctccgtcttgaactgatcaatccaagtcgacatcagcgacagctgttgctcatcggcctggtcatcctttttccggctaccacccatcatatctcgcaatagatcggtgagcttctcttgccgtctagcacttctgaggttgtgtacatggttgccgagagcttccgacacaacctcaaatcgcttgttgactaaagctccatcttttgtctttttctcatccattttcttcctgtccttttccacgggctcgctcttgagcgagggatttcgtgatggtgttcgggaattttctcctcttgatggaggtctagaaggcggtccggaggcgggttgagacggtggtttcgaggtcttgccgttgataggctggatactttccacgctactgtcggatagttcccgcggcacgtcgttattctctttacttgctgtgtgtttcgctgtggttgagaacatgcgagtgaggcgagcggccatagtagctttagtcggcttgccggcggaagataatgccggagcagggagagcgtccccgtttgcgtgggcagccagattcatgcccgccagggcgcgtgctaccgaagcatctccatccggagggtcatgcgaatgttgtgaggctgcggcggaagagactgcggaaggcacaggtgaaggggaaggtggagtcatgtgcggtggatcgacaagtgaagattggaataatggggggtggacacaagaattctccggccccaggatggaagacgagcttctacagcgcgcacgaagctgcggcgaatcgaagttgtcttaaaggtaaggatagagagaagtaagaggaggcgaggcgagagaaaaaaaagtaggtggcctaagatggatggcctgaggcaacaagggcaaaaggtgacgacacaaagagacacggcaaatattggaagtaccacacaccagaatgatgcccgctggcaacgaggagcccctagggtatatagacaagcaataaaagaggagagagaaaagaaaaattaaaaagaaagagaagcaagtgggaaataagtgggataaatttggcgatgctagagaacttgaaatacgacggggttctttttggtatggtaatatattacatagttaaacccataaaaaattgtaaaattcaaatgaaattgaaatataaaaagtgaaataactcgacaactccaagagaagggggaaaatgtgggcactgcaacggtataggttaccctcgaggattattaatgcttgcaaatacttcgttatggtcttgacctatagggctacatagtgcatcctgcatacggtgactccggcgctgtgagacctaaccggtaaagtcgagccatctagagacatctagatacatctaggctataacatatttcgagatatattttagttgcacacacattctttaatagtggcgtacattttcatagaggaaaggattcccgaggtccgttccgaggctttagtactgatttcttttggtgagagatttaatggtaatgaaaccgcgaagtaatccaaagtaattaaagtaattagtataataaagtcgagtaacgaaagtacaggtttttttttttcaagactggaactgggtctctgccgcgttgagaagcttgatacatgtacggagtatcatattattttctcttcactggtattaatgacgttgggtaaggtgacgtcctcctgtatatgtgcactcattcgctattcaacggacactgctatcgctactacaatttacaacgttggaaatacagaggggaagtagctttgatagttccgccaccacaccaaaggactgaggctgtgcagtctgcacaacgaagcccagtcatgattcgatcaggccccgcaccaagccgacacgctgggtgcacttgtggcggttgtggttatcccgaggccctgtggacttccgatgtatgaggtatccatttagatccattcatccgatctaattggggggatactgttgatctattagccggagcatacaatgggaatattttagacgtgctttcttactgtatatggtaggtgggggattatcatttgaaagttgtacttagggcatagctgtatgtgatggaagaccatcctcttacttgacgaggtactacaatacaaattcacactgtatgtaaatcgaatccaggtaaccccagttctcaaaggacactgtcctcgttggctgtaaatcctaaatcccctgtcaaccaattgtcagatccctccgtttatacccgtgctcactcgcttctttcattgtccagctggtcaactcgatcattccgaaagcaaaacaccccatttctggaccctacttcctgccagtgatggctacgcgatcgctgctacgtaataataatagtcggtcaatcatgcactcctcttcatcggggcgaggaaaccgcgtgggtctctgtgcgatggagaccccccgcagcgatgtacaatgtacataatgctctagtacgttataggggaatacaatagagactaaagtagctttccgctatctagcgtcattcggacaaatgatggcatttgggatgggcctcggggtggtacaggttgaccaatgtccatgttcgactgtttcaatttgaaacgaatagaatacaatatatcgcctttcttagccctatgacttctgcacgggaatatgtccagccttattactttggaatgtggaatgcggaatgttcaccgtctcttcggatccctggtgtgtccgtgtgggggcaattcttgacagtgtcttggatttccatactagcatgagcttcgcactgaactcgggcttggtttcggagctagtacggggtggtaactagcggtatactcaataatgttattcaatggctggttttaccccggattactggcgatttccgaataagccccttagtgctgacctcggcacgggacacaggaagaagaatcgagtcagacgttctgctgcagaggagcaatcaagtgaaaatgaccgtttcaatctcatacgtaacgaaaaaaacagcatttccactttctcacacaagcttccgtatccagcactaaccactacgaggcattttcacccaatcacagccctaggaacccatctcaatttcccacagcacaaagttactagttatgcatcgtcgacgtacaacggacaatatacagtactaagccttctatatcaatattatatgcagctacagatgtacttctataaacaagcctttcactactacccctcttcatttcaaagcggatgactatttattctatgatgctcttgctttcatctcttttagggtttcccctcacctcgcaaagcattcccctggttagatcttggtgccaatatcgagaacaaagggcaagccgagcaagatgaattcaacaaataagattcaagcccaccacgggttgaacatatttctatcgttcatagaaatcgtttcatattaaaattgctcccaagtacgccatatctctgaagtccaatcacttttgatagccagctaacagaattcagaagtgcaaatcagccttattattacctagccctggacagctatcctgatgtatgagtcgcatacaatcccagtgtcgcatccgagcagcttaccagggacagagagcttaccctgaattattcgaaggcaagaatcggcaatacaatgggcctctcttcactggaactgctagagcagcgtcttaccgcactggaaggacagtttctctatttccgtcggccaatccttgatgagtggtcaggtaatccgagaagtctgagtgaagtccaggagagaaataccgtagcacgcggtaatatcactatggacatccgagccatcgcggatatgattcaagaagacccattcagagcttagaaatgggaaacatcgtttgcgcatttctacgatatcacatacattgaggctaaagacaacccctctctacaccaaagtccccgccttcggcgattgttccatctaaatgcgaatgttcaatctttacgccggtttactcaacctcgagatagcaacttccagagtttacttgctagtctctacaaacattggatttcagagtggaaagcggacaactccattgagcctctggacgctatcatggcatacctgactgacgtcgacgcaaaagccatttgagatggctggctatcaatagattgacaggagggcttatcattattggggcgtatggcgtcgcccgagactgcggcgctgctatcttgcaaaatgtcagatgatatgccattatgaacctgacacaatagatacaaacttgattgctaggatttagcgctcaaattcatatgaagtgctagtcattcgctcgctgtcctctaccgcatcctcgcgtccagttactataacgccacaacactaactcgctcacccggaacgaacccgtagttaagacgccaagaagatcaaaagggtgcataccattaaggttatatgcgatgaaagcaaaatccaaaggcctctcccgtgacccctggtctacaccaatgcaagccataatccgctatccaatccctgggttcccattatacatatatatgatggcagaggccgggcctcctacagtacacaaagttcaaccctgcaccgaagtatccagggtatccgtatacgaacctttgaacgcggtggatcctaaacaaaagagaacaacctacgtcgcggcatacgtggatggcagatacttggcaaagcgaagatcccgaggatcacatctatccgataaaacccctgttcattcgaggcaggggtccgcgtccacgggtcggttcacatgttgagctaagtgcaaaaaaaagaacaaccacaaagccacccaacaccggccgcaacgcaaattccgattcaagccggtgcatgcttgaccgccagtctgtggtcgcaggaaagacacacacccagcctcgaacctataggattggtcggctttgcaccgcgacacctcacctatctcgcgttgctaaatggtcaaagctcgagataagctgttggcattatattgtttttatcctgcgtgcgtgcgtgtatgtggcctatgggtatgcactagtaactgcactacttacatttctatatatgcgctgcgctacgctacggagcagcagagctcgggtgaaaggggcggagcttgtctttgtgtttgcagctcttatcccgctgtggatgtacgttgtgctaaacctgtctgtgtggacgtctgtgctttggccaagtcatgcaggatgcaggatgtggacgatctgacctggagctgggagctgtctgtgggtatctgggttttcttttccgttgcgatatgcattgagctttgctttttcttggtgcggtgggtggaaaaagcaattgcgagatccaattagtgtcgtatgatctatcttcgaacttgattctcgaggctgcacctatccgctggtcagctcctccatgcagaagcagacgcacgagccacgttgggccggttgggaaagctggctcttggcggtgctgcttggctatagctgttcggattaagagtatgcctagcgctctagacccggatctaatttggactttttttatggcgttgttgtggctgcgggatttctttgatttatacgacctataccccgggtttattataaacaggcattttaatgaccggaaacttgtagtgagacaattcacatggatattgcgtaatatcagcagtaatccattcttccgactgtccccgaacaccagtaacaaatagctctgttcggcattcctagttcataacacttgatatgcgaagccgagctatctgcgggccgcccccgggccaactccgcactgtcatttccctagcgtacagcgtactagcggcgctggagatgccacgtgggaaggaaaccggtctcattgaatggcagtcacacatgaaaaagcggtatgcataaccctgtcgtgcttggcttcggtgctgtgttccggtaatctcatttctcgccaacgtgctgttgcatgcaggtatccgtatcacagtatccttgacaacgggcgagtccgctgcggtgtgtgccagctatgccgctctcacgccttcgagataccggattcgtatatgctaacctcgaaagtaccagcggtgagattctgtcgcatttcccttccttcacttagactttcgcgcgaactggcccccagatttcacgaggcatgcacagttcgatatcatgacagaactcgagtctgctaccagatcagaacacacaagtcaacaacaaaggcagcatgccagaactaaaatgtacgtaccacaaactgctccaatgattcctcgaataactcgttgttcacgcccacaccgccgggatgctcggtcggagaaagaggattcttaaccactaaacagaccgaaatatgtcagcactatccaaacctgccaaacgagatccataagccacacaaaccgtattccacaaacagattgatatagatctgttgcagcgcgatgcgcatgctaggactcttgaggtccgtcagcatgacaaacttggtattcgtcggtgtctcgtagtagtgaagcttgtattggctggtggtaaatgacacaaagctagttgcggtaagcatcgggtttgtccgtccgtctaaaagccagcaccccgtctggcttgcttcaggggcagtcttacttgtcttcttcaccccctagcttgcgcaccatattccgcaacgagaataccgtgccgaaaaccagcttcgaatcatcgtctgtcgagcgcactgtctggccgagaccggtcggcggtgcgtcggtgactgtgttagaccgggacttccccacgatggaggtcgggcgtggaagccagcgacgcttgtagatgcattccgctgaatcgcagttagtatatgaagatgaattcattatataaagcgtgtttaccatgccgatcaaagatgtagaacgagtagacgaccattgtgtattgtgtgacctgaaacaagttgttgttgatgttcaagggagttccaaggctgacaggcggtgaaatcccctatcgataacaaaagcccatatcaaaaaggagcagcctaggatttcttcggcgtttgcgattcgaccgggtctttctctaatttgacttccgtacatagggtttagtatcatttattctattcgcttctgtccaatccccgcaaagagggtctcgtaaggctgacctttcgcttcctacgtcgaatcccccgctcgaacttcctcattaccccacacgtctcctaccagtgcttgatgataagtttatttcaatggacgaaaatcaggcaatggcaacccctatgtcggatatctccgcagagccctctaccatctcactggagggggtgaacgatgcgcgcccccaggcgagcagagttgggtgagtttgactatgaaacaaccgcggaagattcattttcgctgacgccattctgcaactaggtcttctgcatcctatgatagcactgggaggcaccgacgacgaaacccaagagcaaggcgtccggtgaaggtcagtctctcaatgccgttatgacagcttcggagaactgataccgcggactaggaaacactggacgcccactccgagtattacacgagccaagacgacggtactgcggaacatcgcatcaaccaatacgtgatcaaacaggagatcggacgtggatcgtttggggctgtccatctggctgcagatcagtttggcaatgaatacgtatgagcacgaacttgcgggatatgctgggaagtggacatgctaactgtgagataaactgtctgtaaatttaggcagtcaaagaattctccaagtctagactaaggaaacgtgcgcagtcgcatctgctgcgaagaccgcgaggtccgattcgaccagggacggagttcaactcgccattacatcgacatccttccggtgacgataaggagctcggagagaatcctttatatctgatcaaggaggaaattgctatcatgaagaaactgcaccacaacaatctggtgtcattgatcgaagtcttggacgatccgacagaggactcgttgtatatggtgatggaaatgtgcaagaagggtgtcgtcatgaaggtcgggctggaagagagagcagacccatacgacgatgagcaatgtcgatgttggttccgtgatctgatcttgggaatcgagtatctgcattcgcagggcattgtccatcgagatataaaaccagacaactgtctggtcaccaacgacgatatgctgaaagtggttgactttggtgtatccgagatgtttgaaaaagattcaaacatgttcactggcaagtcagctgggtcaccagcatttctcccaccagagctgtgcgtggtcaaacatggcgatgtatccggacgggcgacggatatctggtcgatgggagtaacgctatattgtctgcgatatggaaagctgccatttgagaagcagagcatcttcgagctgtatgatagtatcaggggagatcccgtggactacgaagaagaatcagatgaagaattcaaagatctgatgcaacggattctcgagaaagatccagagaagcggatcgacatgtttggtttacgagtgagtcaatcgcaattgcactgcttgcccatgctgaccagattcaacaggagcatccctgggtaacgaaggatgggacggatcctttgctgtcatttgaagagaacacatcgcagcccatcgagccaccgacagaggaggaaatgaactcggctattacaacaaacatgggaaatcttatgaccgtggtatgttatattcctcgttcgatagtatatccattaacaaggcccaggtgaaagcggtcaaaagattcaagcgactaacagatccgaccaaaccacaatcccccattgaaagtacgttcggtaagagcattctaggcggcgatcacgatgcctactttgtcgagccaccaatggaaatggacccagacgaacccttcccggccgtgggagcggctccacaaacacatgatggccatgacttcagtgcaggagtacgcaaatacttcggccggcgaccttttgccggactccgagacgattccggaggtttcgggtctagcgattcggccagtttttcatcccggccggagtacagcccgaacagcagcaaaagacccagcggcgtgttcgagcccgagcgaaaagactccggctcgatccgcagttggggatcggctcaaccggatatcggtcacgaagccctgccccactctcaatcgggatcaccccatatccctctttcgcgagcaagctcgggtagaactaagcgcagcttagaggggacgagagggcatgcccgtgacccacttgaggaggaatttccctacctcttcattgggccatctacatacaccggctcctcgcagccggaagcggttggtacggaaattagtggcgatccggggtccattctccaaacgttggaacattcaatggatcattctgaccagatggaggacgatgagccggtacagttcgtcagtgaatcgcccggcgctgccgatttcaatatctacgaaacagcatacaggaaggaactagatcgcataaagcacaacctgaaagaccgcgacaccggcccgaaggtgtacctgactcgcgtcattgagaaaaacagcgacgaagtggtgaaactggccaaagagaaggagttggatcttcaaactgggaacgaatttactcctttttctctgccgagaacatccctaggcttcgggcatgccgttaacgcggtacgctcgcagatgctgcagaaaagacaggccggggagttggaggagcagggtggggagggaagtaaagatagaggttcctcgcagaaccgcgagcttcaccctcatcctccgaaacgtctgtccgtctcatcccaggctctacttaagcctgagccgtcttcgctcgaggcgacaggtgtgtcgtctactgaggggaaagattccaaggcccagctgcggcggattcttgatcgggttcgtgggaagtctgatggtgcagagtgataggaggtgttgtttggatagaattgtgtgaagcttgggttctttgtatcgagatagcgttatattcaaggcatatgcactgccttcagcatacacatggcaaacttttttgaaaggagcattttcgtgaattctcgttagaatgtgtgtgagagcggcgaccatggcgggcaccatcacgaagtatggcctgtgaaactctataaaatacagaaagcgcggttctagactccaaggccccgataataaaaaaataaaaaagtcatcgccagtatgcgatccggcaacttgagatcaaacggcactcaagctgaggatggatggacggggatccatagtggcattgcgccaacgtcgccaacgacaccgctaggccagatgtccgtccatccattcatacatagtgtgcagtgtaatctagcatacgtagtggactgatacactgtatgagtctgaggctgagagtaagtaccgctttccattatacgaacacctgcgtatctttctctcggttctgttaaccagaactttgatgcaaaatattaggaatacgatggtgtaaagatccagtttcgaaatgcgcctacattagcaaaagccatgtttaacttacaaggaataaagaatgaagaacgagaacaaaaggatatatgtgtgatattaaatactctgaattcattatagactaggacaaagagtgtaagacatcatcctataaggagagtcgagatagaagggaataaacaaaaaagccaaaggccaaatccaaaacagggagccaaaacatcatcaaaatatcaaaatcagaagtaggataaaatacaggttaaacatgccttaagcagaaaaattggaaggctcaaagaaccgccatcgccatgtagtagcaatagacataatgcatcatcatcgtcatcaaatgcatagcacgctagacattgggctgggctggagggagaaagaaaaagcagagagcagaaaacagaaggtataacatcgagatagaagataaaaagaaagatgctaggcatggagggcatcaattggcgtaaacgtcttgtattgtcttaggtcgtggggcttggggtaggcttcacaatattgagaatgtgtgcctaggagacgaatggagagcgggagtagaaggaaagcagtggaagtctcgcttgcttgaactggggacgcaatggtgtgaagattcaatcataggaaatcgaatatcaataatatgaaagcattatcttcatcgaacgtggggaactcgtggacgcatcgatggatgtatgaaggtcactgtcaaggggagaagggaaagagaagcatttctcgtcttgtggtctatctgaccttaggtagattgtacctaggttggcagacacatgggcaaaatgagagagtgatgaattgtcgaagggagaaagtcggaggtgttgaaagaagtcgcttgaagagcttggagaaaaaccgcgcacaataaacacaacacgagaacgctgtctattgttcatcaatggctttatcattcattcatagcccttgggcctcaaaaaacaaaggctgaaatcgaaagtcgaaaataacccagactgggatcgaagtaaaaatgagaatgaaaatgaaaatgacgatagaaaaagtatcaaaatcaaatggtcatcgtggaggtttctcggcttgagttgtattcgttcgttccgagtatggtgctggctggtcaggccgagtgagcgaatcgcgccgactactgtctgacggggagaaccggtctgctgcaaagctgtagggccgctcggctgggttgctgaatctagggaaggcgtctggagggcctagttgtaaggcatgtggtgaagggaggggatggaccatctctgtgggccggggtagttcacgcatgttgatattcatgcggggtggcatatcgcggcgctcgtcatttggcgcgggaccggggccaggtggtaggactgctgagtgcatggttggagtgtcgtagagagttggggctgggcttggcttgggtccgtgaaatgcttggggtgccggcgggaatggtgtagacgatgggcctgccgcggggctggtcggtgaagaagggactttgagtctgcgagaccaccctgaccgtcggggggctgggtaagtttcaccacgggcctcggctaggagctttcgtcgctcggtctctgctttgcttgggcgtcctcgtttacggggtggttcgccgggggcgacatctagtctcggggagagctgggctgatgcgccgctttcgctgctgtaagaggcggtgctggctggtggccttggttggattgcacgagggattggcttgtcggaaggatgcaatggccgcttgcgcatggtgctagggtccattggggctggtgggccggtcatatcggatggtggtgggaatgaagccactggctgtgttggagggtgcacgggctgctgaaccatattgagataggccgttttgcacgagctgagtgaacgaccttgaccggggcaggtgttagcgccatgttgatattgatcaagctatccttccctttctttttctttggccggcaattggacgataataccttgaggaaggggaatatgctcccagttgggagtaatcccatattctttgatcatccgtactagatagctggaaggaaatcccgctttcttgaggatctcggtgagtagagtgcactagttcttggtcagcatcacattcacatcggctaaagaatgcccataccttgtcctcctcggtccatggcctatcggatagattcgacatatccagaccatggaagcggattatagccggcttccctttcccctgaaaagaaaagaaatataacgtgaaagaaagtaagaaagaaaaacaaaaacaaagaaagcctcccagatgatcccggaaacaggacagcgaacggcgtcaaggtcgtgatacacaattcagatcaattgatctctcatatatgttcgagaggaaaagcgaagagagcgagagagaaagaattaaaaaagaaaaaaattcaatcaaaagacacgcgccagagaacgagagggtgtcttatgtccccatatccttccacgcggagacgaaacaaaagggatgacaagagggaaacgaatgatctgacaattgaaggctttgtagccaaagaaaatgaaaaaagagcagccaaaccaaactccatgcaaaatccccaatttatttttttttctgggattttttccaggaagaatttctagccaaacggacttgagcagccgggatcgcgcaggagaccagcgttcgggagggaagctgcagggacgatgctttctggagagtgttacagtacaggttagaagaatctggtaaagtatataccacaggtgaatagaaatgggggtgtttcagccgggccaagtttcatattgttttccagaagagtttcgaagaacgtgaaaaaggcaaaattaccactaagaagaccgggaagcggggagattggatttctgattcctccgaaagtacaatcgaggggttgaatggagtgggggctgcattgtatcgaacagatgaggtcttctgcatagggttgtatgggctgggaatgcccaggcaatataatgtataagataggcttagatctcgccgaattgcatcgttggttcgggaaacggttggccctggcagttccagaaccaagggacagtttgacgaagcgttatattttctttttttgggggcaattttagtgcatgattttggtttcgtcgggtcttctccagcaaagagtggaatcatggagccgagaatgggatttgataggtgccaacatgggcccgggacattgggacgccccaagaaaatgcagaaaatgcagtgaaaaatgattttgtttgaagctagcctcaggggcggttagagtgggcgatcgtacagagaaaaaaagcgcgtctgtcatgcagcgggttctgatgaaaatggggccagaacgattggcagagatgagccgagtggagaggcggactccgccgagatgcagccatgaggttcttggtaaaatacaggtaattgattaggggggaatggtgaagatggtggagatgaagaagatgaagaagaggagagaggatgaagaagcacgggattatatagaaggacagcctgaggcagggagccctacaatatcacatttgatatcacatcggtatcccatgcgtattgtgcctggtattatcaggaacagtatcatgatacagcgtatctgatgtgtaatccccgtaatctatgtcatccatatactaaaccagtttgaaacgcacagacttccacgttgacgaacaacacacatgcagacgcgccttttcctgctttctcctccaatcgatttcataactttcacgcttttggattttcttacatttccccttgtctggtctttcttcgtttccatctatatcactttaggcttatgctgaccttgaacaaccctgtcacagttcccgtgtggaaatcaccacataaatgttaaaccacaattgggattgaggaatgactatggtcactctcccactactctaccagaattggtccatgcctattccaggtatgctctttatgagcctgagtgggaagtgaaatcaagaccactataccataccacctatacaacatacaaccaccactggtgaaccgagatgattcaggtctatacaagacagtgagagtaggctcaaggcggtgagacaccgaaaatgacaatagcttcgatttcagtcaaattaggagatttttatcaatgagattgtttcttaccttgaccgctctggaacccccttgattcccgagggcatatcctggcagaatcgtccccgaacttcgtattctgctttattttcttcttcctcttgctctatctctctctctctctctctctttccatatcttccaatcgtagtccgtgttgtcatgtctgcccatggccacgcggactctgaagaggctcctgccaaaatggagcgggactctccggtaaacggcattcatttgaaaaacggcgagtcgcgtacctcatctcgatctcctctccctccgaaaaaagagtcctcccccaactccgacccatcccatacaatgaaggaaaacgttggcgacatcgttcttaaacgggaaccgggccaaccgctcaagctgtctcgcagctcgtcgcaaaaagtcgcgtcgcgacctccgccgctgtacacgcacctgccagatagcacccaggatgcgctcgccacctttgaacagatccccggctgtacctacgccaacaaatatatgggctacaccgaacatgccatggaatgtgattgcgctgaagagtggggtaagtttggttttcgagtagcctcgctgtcttcttgcccgattcccggcctgatggaacctccacgagcatatcactgatccactctgtagatccgaagattggtcaaaatatcgcatgtggcgaggattcggattgcatcaatcgcgcgaccaagatcgaatgtgcgggcgactgcggctgtggctccgactgccaaaatcaacggtttcaaaaaagacagtttgcaccagttgccgtcatcaaaacagaaaaaaagggtttcggattgcgcgcggaaaagaatctcgacccgggcgaattgatttacgaatatgtcggtgaggttgtgggagagcagcaatttcgaaagcgcatgagacaatatgacgaggagggcatcaagcacttctacttcatgtccttgaacaagggcgagtttgtcgatgcgaccaagcgaggcaacctgggccgattctgcaatcactcgtgcaatcccaattgctatgttgacaaatgggttgtgggcgagaagctacggatgggaattttcgctgaacgcgcggttcaggccggtgaggagctggttttcaactacaatgttgatcgatatggtgccgacccccagccctgctattgtggggagccaatgtgcacgggattcatcggtggacgcactcagactgagcgtgcgaccaagttgtccaatgcaactatcgaggctcttggcattgacgaggcagatggttgggataccgtggtggcgaaacgccctaagaagaagaagatggaagaggacgacgaggagtatgtggacagcgtgcagcccaagtcgctggatgaagatggtgtgaccaaggtcatggcggctcttgttcagtgccaggagaagtggatcgcggtcaaactgctaggccgtatccagcgctgtgacgatgaacgcgttcgcaatcgcgtggtccgaatgcacggataccagatcctgaactcccagctcgctcaatggaaggatgatcagaacgtggttctgcagatcctgaacatcctcgacgggttcccgcgactcacccggaacaagatccaggactccaagattgagacgaacatccggccgttgacgacctgcgatgatgagcgagtcgcgaagaaagcggccgcccttctcgagagctggtctggtctggaagtcgcctaccgaatcccgcgcatgaaacgcggcaaggacgcgaagcaggcaattaaccagttcgagcgccgcgaaactggacaacagcagcgccagcgatctcttactcgctctccgtctcctgtgtacgatgctcctcgtggaccagtgcagcaacgaagagaacgaggtcctcagcggtccagacaacccaaccgtcgtggccctcggccattgcccgagggatggtatactgcggaggcggatggccgcatttactactactctgcatcagggaaaaccacatgggaacggccaacgttgcctgctactcctgttactcctgcgccaggtcagcctgctaaaaatcaacagaacttggcattgcagagtatcattgatgggattatgaacacccaggaggacacaccctccgagcaccgaactgatacgcccgtcactcctcggccttccgctgatcaaccggagaaaagacataaagatggagagaagtggaggaagcttccattggagaaacagaagagaatctacgagaacactgtgagtattcacgcaaaacacgagatataactagactaacatagcacagcttttcccgcatatcaagcctgtggtggatcaatacaagcataagatccccgaccatcatctcaaacgatttgctaaggaggtaagctcatggtcctcccttcgattctttctggtgcgatttcaatttgctgacatcctcattaatagaccgcgaagaagctcgttgaaagtgattacaaaaataatcgcgtcaaggaccctaccgcgaagatctccgcgaagcaccagcaaaccgtcaaaaattactgcaagaccttcttccgcaaggcggcagccaaatacgtagatcgcgagaagcaggagggcgagaagtcgcaggacgccaccccaaaccccggaagcgaggttcctagcacaggtgacgatgaagctgtcgcgggtgcgtctgcgagttctcccccggaagacgatgacgcgtctctcaaacgcaagcgaaacggagtcttgaatgtcgacggtgctgaagaaggagccgcttctccctcgaaaagacagaaatctacacccccaccgcctcctcctccgccccctccagcagatctccctaaagaagatggtgatggtgataccagcatgggaaacaccagggacgcttcatctccgaaagccgagtcgggcgctggagtcgacgttgccatggaggtataggcaactcctgcgcgtcttgtcttattttgtgcttctgcatcaatacccaaaagcgagtcaaaaagcgagagaatcggaagaaaatggagggattaaaactgatatctcagtaacctacattacttttgcttctaccgtgttctttttgtgccttttttacctttcttatttttttgctttctattgctttctatgctgtcgacaatacccccgagcccaagtgccactatcatagtttgcatcaattcagcccatcttgagctgtaagcttgtcttttaggagatctatacctctaggcggatatctaaaagtccacaagactaccatcatgatcgatatcgatatgctcaagtgtcaacatctatatctcgattaattttagaaaatctttttgatactacacactccatccatcatgcataattcattcgagtatatgcaaagcacaggcattacagactcccaaagaaaaacccatcagaccgaacagagagcagagaacacagagccgaacaggggccccccaaaaaaaccaaaggaattttgccagtaactttgaaatcaaaaaatcattccagcgtgaaaataagaacaggaccatgtaccgtaaagagctcaccagaaaaagttgcaagagacaaaaatctagtagaaactctccacgatactatccttattgacaccagccccggcggcgccgccgggcgccatctcgccgagtcggaacacggactcgataacgctcagctcagtggctgtggtgtcgaggccggtgatggcgagccagtcgttgacgaccatgccggcgccgacgacgggggagccacggttcacactgccggccacgagggggacttgcaggagcgaggagagctcgtcctggtcgcggattgaggtcttggggtgcacgattccgccttggtttgagagggccatgtacgagcctgtgaggacgttgtcggctactgtttggcggaagacttctacgccgaggacgtcggcgatgctaggaaagaagatatgttagttttggaagaagaaaaaaggaaggaagtttgggatggatgaatgcgttatgagggctggactcctactcacatctcctcagtctcacgctccagatccgggtgcacgattgcgacgtggtcgttgcagcagataacattgccaagcgcggaaaggcgctcttctatgcgttggattttgacttcggctggaagcgtgttgcgcaggtgttgcaattcttgatctgtggtggttgtggggacgaggagacctttgcggttactagaggcgagatattattagcatttgtgtttttcttgataagttttcctttcctgacaggaaaaaaaaggctgttcattttgaactagctatggccgactcacccgacgattagacggccgacaatgcgggttccggcgatggttgcgtggcagatgggaatgacatcttggagttcggattcgaagacactgcatttgagtgttagtggtagttcctgagtggattggggtagaggctagggattgagattgagatttgaactggcacagcattggcagtgtctggatatgccttagcaccacccttcctatccatgccagtcccaagtcccaatctcacacccttttgaatatctgaacgacacacctgtagaagttctccgaagcaccaaccgcaacgatagcgtaggcatttgtcaggcaagagaaaacgccgaccctagaaggaaaccgtcagccgcagcccccgagcgttcgttctttgcttttgggagatcctactcgttcgagttctcgaattgcgcgcgaacagccataatggttagagtatcagaagatgttgcaaagagcagagtgggaaaaagtgtgcggtgaggagcggggtagcgaaaagcgcaaagctagcagatgcaagatcaacaggaacggaaactgtgatctagaattagggaattcaaggatcgagtctaagatttgcagaatgaagccgagataaataatttggcagagacgtgcgatccaactgaaaaaagaacaaaagctcgagccaattagaggcttcgctgagtttgccccgccggagccgcagaggcgagttggtgggttggaaatatgtaccggtactcattttactatgggacaaattatggtatactatgtaccgctacttaatttatactgactcattctgtctcatcttgacggtgattcattctgcatacaacatagtctaatattccaaggtttactctaatatcagtcatagctacgcacagccatgcacagccacaagaacaaaacataggcctggctagaagctagaatatggctgatgctacagcatgtcaaccctagtcatcttactcatccttgctatagcccagataccgaagtgagaaatcaatctaaatcatcaaaagtacgtattggactagatctcgaagggtcactgcgcacgcgcgacattagaggaggcctaagcttgcgacttgccagttcgattcaagagaacgagtgcatcttcatcaagatactaagtacagagagaggaaagaagaaaactatctacaggctgcattctcctggttttgtgcggtcttcttcttctgcaaaccatgcaaaatatggaagctcgcttaggttcccttccaatcgaggaaggagcgattctcccagaagcagaaggtacagatggagtacgaggccagatcgtcatgcagctgactacctcgtacatgtatcccaagagttgaccgctcccaaagtatagccaagccggcgcacagaactgccccctctcttttatgatagtggcagttttcgtctttgcgcagttggacccgcctccattgcctttgtaatgtgtttttgcaagatctggatagtgtttgatgtggttttcctgacataatttgcaacaaatattcatcgccgaaagtagccctagagccactatgctttttctctggagttgctggatttctttctgccgaaaccagagatcaggagattctggtgtatacgttgatattcgcgtcatctgttcgcgggatggagacgccgaacatcaggctttcaggaagcctagtccaggcattgaccaatagaacgaatggaataccaacagcgaaaatggacatggggatttgctcgaaggaacttccgaactgtccatgcacaagcgcagcataaaatgctggcgcaaggtatccaaagttaactatgagaagaaagctatcttcttcgtcctgtgatatgataactctgcctctaccagggtatgttgcagagccagcatgtgtttcttgtgtatcatcccgataccagccagctagtacctgggcagtgctgccacgaacctgccgaagggataaacccgccgccaagatcctcgagtctgaagggtagaccattcgattccgcatttatattcttcctccggtatagcatggaatcgagcgggagattactccaattatggagttgtaggactaggaggcgaggaagagaaaagtagctatatcgatcaagttctcaacataggcaacctctgcggcgaaaagagccatttgctttagcgacgacatctcgatgaatgtctcactagtagtaggtgcatcctttctctttcctctggtttcctcgggaaagccatccatggctcttgcgcagtccatatcatattgccgtgttgatgagttacttctttatatccgtccctccaggaattccaggagaatatttggcgacttggtcaagtggtattggaaccgggcaccgaaggactgggacatatctttccagtcacgcaggagggcgtgacatcaagacgttggacaaccgagcttcctttccatgtttttcgagcgggactgcgtactctaaacaatgaatcccattcccaagtatttgattgtggtggccatattggcctaggctctgctctgagttgttggacctcagctcatggttgaatatagcggggaattccatcgtcgatgaatccagttttatggttgattggcttcgtctcgggagttggattaatatttgtatatagagtagcagagttccgcatggcttctccagatagtctgatcgatccggcttgatgatggcccgttctgaaaaccaaggggtgatcttaaatccattgtcatcgatgatttggacttggattagagccatttcgcatactaccgatccagaggcaaggccgacagaggcaagccttcaagatctgcatgcaatagtggaatcaatccactggttgccgtcatcatgctcctcaaaccagtttgtaatagtgctggcatcgacttgaagtgaagtgcctccatgagaaaaggtctcgagaagtcttcgatggctggtgggtttttgtatatgaggagttatcggcacatgcgagagaagtcatttttggaagctaagtttgtctggtttgtgtcgtagacgtaaatgatgagtgaaagaagtgaagggggtaaaaaaggtgaaagagaagaaacaagtggaagaaaagaaagaggtggacaaagtggaagtgagatgggataaagaactcccagtcaaaacaattctggcgtcttctctaattaggacatcccttcgatgaactctctcttgacttcatttgaatctctcacttttctcacttgctgcttactttcactttactttcacttcagatctgatctgttttgatatcacatgtctcttactctttccttactacaaaacccattcaaacgagaaaatgtattcattctgatgccctccccccctatccccactcaggggggaggacatcgcaactaaacgtacaaaaaaagaattggtatcaactgcggggaacgctcacaaacatcttggtacaagccggcgggtctagtacccgcgcggcgggggcggggggggcgcgccgggcggcggcggccggtagtatcgnnnnnnnnnnnnnnnnnnnnnnnnnnnnnnnnnnnnnnnnnnnnnnnnnnnnnnnnnnnnnnnnnnnnnnnnnnnnnnnnnnnnnnnnnnnnnnnnnnnnnnnnnnnnnnnnnnnnnnnnnnnnnnnnnnnnnnnnnnnnnnnnnnnnnnnnnnnnnnnnnnnnnnnnnnnnnnnnnnnnnnnnnnnnnnnnnnnnnnnnnnnnnnnnnnnnnnnnnnnnnnnnnnnnnnnnnnnnnnnnnnnnnnnnnnnnnnnnnnnnnnnnnnnnnnnnnnnnnnnnnnnnnnnnnnnnnnnnnnnnnnnnnnnngtgggcccgggtgggcgtgggtggggtgggggaggagagcacggtggtgcgcgccggggtcagttcgcatcattggcagatgttggggcatgggctcggtcagagccgcatctgccaagatggaaagtgcccgtgggtgcacggggaaatcagcgctgccatcgtagctgacgaacttgccagctgtctcttgctctcggatgaaggaggctgcattcagcatgccgttgaaggcatctttggcgcacatgcgcagggcatcttcgtcgctgatttctgtttctgctggtgcgatctcctcgttcaggcggcccatccgtactctctggacgaactcctcccatccctcctccgcggccacaaagtccgctgccccctccgggtctcgaactgcttcggctgcaaatccgcgctctacctgtcttaccgccgtatcgccgtctcggaaaaggaagtgcttcacggattcctcggaatccgatgtgtcgtactggggattgattagctgggtattcgtttgggaagtcagcgtactaacctcggtgtgttcatcatcctcggccaccctgcggccttggatcagggccatcatcttgcccataagcatggtaaccatctcctcttgcatttgcttgatgagcagctgtttccacggttagaattcttcagtgatacaacttcgatccaaacttacatttgcagtgtctttgatgatgtgaacttcgcccacatatttctgagtctccagctcagtgttcgccgtgtactcgatgttcaatttctcagttgccttgcgttggtactcatccagatcccgctggacttgttcgaactcagggcattctttgtgcgcatttttatcacgggaaagcttgtgcacggtctgctcggccatgaagctcagcgcaatatgctgtgcctggccaaccttcttgaagagcgcagacatttcctccttgcgagattttgtcggcatggactctggcgtaggcgatggggtgggaccacgccagttttcgttaatgtcccagatctcgtcttcgattttcttgccgcgtttgatcagagtagccttggcacggccacgtcctcgaccgcctcgaggcttggtaactgctgcaggtcgaactgggccgacgaatccaccgcggcttccgcgaccacggcctcggccacgtcctcgaccccggccgccacgggctcctcgacctccacgacctcctcggacagcgctgtcggcaggggggtcgaattcttccgagggaatagggatgtcctcgggagatgtttcattctgagttgatatctctgtgccatttaagtggctttctggagtctcttcgagctccgtctcatcaatccgcagctttttgttcacgcggtcctcggaatcaatatccggagtttcattttgctgttccagtgactttcgtttatgcagtcggggtgaagacacctgattggaaggcgcttcttcagtctgggaaattttgggactttgacccacgggagtagctcccggcgacacaggggccgaagcaaccatgcgaggttcaggggattgagatactttttgaaagggaggttcggacttgaattcctcgtcatactggtgcatgtcatcatctggctcggtgatctgattatcaacggccttggttggtgagacatcttcttcgaaggagccctctccatccggcttcagtcttgctgattgccgggtggtccgcgaggactcaggaacagtccgaggatgccgaggacgccgcatgcgaggggtctctggattttgcgagacggcattgattgcggtttcattttcattttcgccatcatgggcatcatccgcatcagcttgaattagtttgagtgaggaaatttttaatttgacgatgtgcgagcgaacttcaggtctgctcggtgattcatcggcaggaagatggccaggaagactaggaacgccagggaatccagcgcggccacggccgcgaccacgtcctcggcctcgacctcttccccgagtagaggggggagtgggaatgatatctatacatctcagagattggaccgatggcgcagagctgtatatgaacataccttgtgcagtgcgtccagatcgcgtagaaatactaggagtcctagcagcaggctgtgcagccgcgcggtttttccttcttcccaccatcgctgttggtctgaagaaaattagttttgaacggggaattgatccagtagcagcaagggggaagcgcgggaaatcagggtggtaagaatgaacaggaaaatgagatgtaggacacagaggtgcaatggaagcaagttcccaagctcttcagtaggaaaatagtagaaaagggcaaagtacaagtcgcgtttccaaatgcagaatggagaaaggaaacgtcactcttgtagcaatggagaaaaaggcttggcaggaaaagcgtgaagtagaggtaatacacgtcccagatcagaagaagcaaagatgcagagatgcagagacccgaagatcccagatcccaagatcctaaagatccgacgaacctcacggtcacgatccaggagacagggtttaccagcgataagaaaaacaaagtgtggggagtggaaatggaaatggaagggggagacagggaagacgcaagtaagaacctaccaaagcgacggatctagcaaaaaaagatgcgaagtaatcgaaaacgcagagatctactgcaggatttgaccgggtggatggggaaaacggggccaagtaagaaaaaaaacgggggggagagaagaagatgcgaagaggaaaaaagaggttcgatggaataagacagggaaaaagggccaaaacaaggtgattaggagaagttggaaccggcgtctcacacaattcaagcaacgggatgtgttttgttgaatcgaattgaatcaagtcgaagaagaaattgcattgttctgattattgtgtattcttccattctatgtctattgagcccgactttgccgctcggctgaggctcggaaggacaatagcatacaccttcaatacatgactatattctgaatagaatacattcattccctctacaactgccttggaacaatagagtctataccatcatgtacgtgtatcgattcccagccacttccggcatacgtacgggggtatttggcatggacaggtctacgtatagttactataggtatgctgatattgtctgtctatttatcttatcttcaatagactattcatatactgttcatatctattcacatctattcacatctattatccttcttgatatcttctatagttatccccttcccctaagaaaaaatatacggacccacttaagtctaagagtcggtgacaacaacgcatgcggatgacttgcactgtagactatatacatattgtatatattgtacgtactcttcatgctattactttgattctatgagccccagctgagatatattccggagtatcttcagataatgtgtctcttcaaggcacgctagtccacgtcatccctagctacggagtactttgtatatttcctttttgccacaaggctgtcaccaggccattaattaacatggcatcattctcaagtccatcaggagtaaaataaacttccaggtatcgtataataaagcgcaacaaatacgagtgccaatcagccacattactccgcactactcatcgtcgaatatatactttgacgcattcagtaactatatgccgcagcaagatccaattataccatccgtccattccctatgtacacaaaatatatccaaggatccacccatatccatacccatcatgtacaaaaaagcaaaagcaaaacaaagagcaaaaagcaaaaaatcatgcagatcaaatataccgaggtagatcaatcacttttcataaggggattcgttcaattcatatctcttctcggaatgcgaacgagcaaaaccacgagtcggcctcgggcggaagctctcgtccgactccggcaatggggagggcgtgcgcatcgcctggtcgcggagggagcgggcagaccgcatgcgcgtgatcgtgccggccgtgatagtctgtcccgcgctcggtgaggccttgaccattgtgcccggcgcaaaggtgggcgatggacagggactagttgagcggaagagagggtggatgttgttctcgtcgaaggggttgtattcccacgttgagctgttggagctggactgcgtgggggagtcgacgcggattgtcgacgctgttggcgacggcatggggtgcactagccggtctaaggagagtgcgcttggtgggctgcggcgtaggctgggcatgctgcggatgctgtgggtgccccggggcagggagcgagggtcccggtatgggagggtgtcgggctttttgtcctgtgttggggatgggctccgggaggtgcgggttgaggagctggtgtcgatggacgcgttcttctcttcctttgtgctggaaggacagagtgttgcgtcagagtagcggctggaccgccgggggaatttgcggagggaggatcttttgggctcgaatagctcggacaagtcgcatactcgagggggtgatgggaggaaagtagggctttgggggctgtccttgagctcttgcgagttgatatcttgagagtgggcacgcggccattcagggttggagttctcttgggctagtgttactgcgagatatccgcagtacaagccctgtgcgaatactgatagtgcccagaacacagagcgaaccacgaagatcgaggttcgaaggctcattgccattgccccggcagatgctgcggcggcaacaagtaaatatccaccggcgacatacatgcattgtcgacggccggttgggatatttcggtggtacagtagaccgatggcaatcaaagccacgcagctcactgcacttaggatagtcgaggccacatcgggcgaagcttttgattttgcgtagcagataccattcagaatggtggcaatgaatgtcatgaacaatgaggctgctgccaacgagtaagataggtaagacatggcgaaaagagaacgatttggcaaagaatggcctggaagtatatatatcaaagagagtaagagagtggatatgtcaaacgttggcaggctgccaatccaagacgtttaccaatgcacgaaatgagtgttaggaatctgcagactccatgagagggaagatgtctgtatttatgagtcgagcatgcgtcgatgcaggagatggttcgcaacacgggacggggcaatgcggatctcagcgtggctcaaagtatatcgaccggggaagcagtcggtgtcaacctgtcaattcttttttttcccaaaggagccggtctgatctatcattccggcatggtggttagactttgtatataatcggctttgacagggatcatgtcgattggcctaggcagagcgatcccgccggggatgcataatgtgtgtggatatcggcaattgccatctttctagccattgaggcgaagacattgcgcttaattctggggtagccctatcctgtcaggactcagcctagacccgtcatgcagaggaatccgatagtctgatttagtcctctgcacgccttcgcatatatctaaaagacgtaaagacatgagacacacaaaagagcatctgacaatatattggagtgttcttacggagtacattaacacccctaataggtatcatcttggacccgacaaacacactatattactgaaggattactacgtcaaagacagagcgcataggcgactattctcatttctttaatctcactaactgacactatttaatctgatccatcagtcttgtggacaccaccgcccgattgaggtggcggatcctcttcgatctcaatagtgcgggccgaatgtgatgtgtctctctcccttgcaagagaaaatctccgcgctcccctggatctcggctgaaccagcctgagataagttagtgcgaattaggcagatcgaagattgtactttgtagattttatagatccatacttcgtagtagctggagccacgggatatcttgacctgtcctgcaggaactatggagtatacaggttgaattgtctgtttccactcttccggaagaagcctgccgcatgccattgagagtatttgtcagttttaattaagagatttgcgtgttctgtggatttttcatatgtatcctttttccgtgtgggtacgatatgtgcaatgtgcaatgtacagtgtacaccctccgtgctacttactgagaggcaatagtggcgcttaatactatattatacaggagttcggaagtaccgagagttcattgtagagaggacttcgataccattgcagcaatttgggatatagatttgcatctccaacctgttgactccagatgtctgcccaggtgggatgttgtcatccaggcggcaacaggcaaccagcttggaatcaaataatccgatgtacacatatgtacacacatagaccgggagagagctatacacaatatggagcctataatagctgtcaatatcaaaacttcctttcaaaagttaccctggcaagttgacgcaagttgtcatgatcgtggtagttgagtagtggaagtaaatccgaaggcggtcaccgcactcgtttgctatcatcgtcactctgaatgctcccctcctactttcttttcttttcttcgacttttcttcgactacatcgctgagaggatcctttgcatcaagtaatctccctctctcctatctcaatccgtcatcttttctccctatccctttgctccctggttttactcaaaagcggcaaaatgaagctcactttcaaggtacgaaaacttgctcttggggtcctcactgctgcagactgctgacagtcatcgattacaggatctgaagcaggagaagtttgtcatcgatgtcgaaccttctgaaactgtacgtgtgttcctgtcgctataactacccatcgtcatctagtgcggggctcatctgtttaggttcgcgaggtcaaggtcaaaatcgcccaagagaaaggcgaatatgaggcagagcgcatgaaggtcatctactctggttcgtattttcccccttgctagacggattctccgttcacggtgctatggctaaccttcgctttgttccctttataggaaagatccttcaggatgataagacagtcgaatcttacaacatccaagaaaaggacttcctagtgtgcttgccttcgaaggtataggttaacctggtctatgatttccgagccagagctgacatttgatgtagcaacccaaggccgcctcatctgccgcttcctcccaagttccctcgaccccggctcctcgagctcctgtgtcaacgcctgctgctcccccggctcctcatgctgccattgctcctccctcttttgccgcccccgcgacaccttccccggccggtgcagctccagctccagcgagcggtcccgctttcggagacccttccgctctcaccatgggctctgccgctgagggcgcagtcgtccagatggaggcaatgggattcacacgtaccgatatcgaccgtgccatgcgcgccgcattctataaccccgatcgtgccatcgaatatctcctaaccgtaagcttttgttggaagttacttcttgaatgtttgctaatgatcacgacagggtattcccgaaaacatccaggaacagcaacaacaacgacaagcctcagagccagcccctaccggcgctgctcctgctgcccctgctgctccttccagtgatgagccgcacctcaacctcttcgaagctgccgctcaggccggtggtgaaggtggtggccgagctcgcggtgctgctggtgccggtgccgctggtggcgaagctctcggcagcctggagttcctccgcaacaacccccatttccaacagcttcgtcagcttgtccagcagcagcctcatatgctcgagcccatcctccaacaggtcgccgctgggaatcctcaaattgcgtcaatcatcggacagaactccgatcaattcctgcagcttctaggtgaggaactcgaggacgaggaggctgccttgccacccggcgcgcaggccatttcagttacggaagaagagcgcgatgctattgaacgtgtatgttgaaacttcccctcgatctcatagttttatgactaacccacaaccagctatgcggtctgggcttccctcgcgactccgtcattcaggcctacttcgcctgcgacaagaatgaggatctcgccgccaacttcctcttcgaccagcctgacgaggatgagcagtaaagaattattgttctcttttcgacttctcttcctctcctacttttcccctttaacgttatgttctatgatgaataccaagcatgctgctgtttgaattgattcccatctctcctcaccggatcccttcccatgaatacgactcagtgctcagctagcgtgtctgagttcctgtttgctgagtgtgtacttggcttctttgcatcccgctgttccctttctccataacgcctgttatgtatttagcttaatgggaaaaatgggacttgttcgctgcatttggagtatgagtagtcgtgtaatgttctaggataagtggcgatcttcaatctggtcatctgtcatggtgtgattttcggtcatgcgtattttatatgcaggtagactgtgcagatgacctgcgaatagtacaaggtatccgctttggagaagtctatatatatcctccacttggtactaggccgcgagacccgccaaatcgtcataatatatctccacccagcattccttatgtcgagttgatatatacaacagcccttattgccattatcaggcaacattccaagagtatgaatgtatttttcgaatgtccgtacaaatattcaaactgacaatgcgctacccgcataccataacccagctgaccaacctacaggaataaaaaaagccattgaataaattgaacatggtactacttacacgtagtcatgtagaggtaagtacaagaccagaacccccaaagatatcaactcgaatcacgcccatccccaatgcaaaaaaggtatctcatagacccaggaaccaaccctaacatgcaccgaaaatattcagagaaagagaaagaaaaagagagaggaagagagagtgctcaattcaaatgagaatgtacataatgcatgtatgtagtttcccaaatacacaagatgaacaaaaaatacaacgccgcatccatggacatacgtagaagtacatccatgaacgagaaggagaagaagaagacttatttgcaagatctctgcacagaccaaacatccagcccacggcgtccaacgacccgtttcagagtcggcaggatcccgtcgtcgccgaagtccatgtcatcgaggttgaggtggttgcgatacgaccacagttgatggagctgcaaagtttggttttgggcttgggcttggtcttggtcttggtcttggtcctggtcttggctctgaggcgcagagaagacgtattgatcgaggaaagtagccgatgtaggcgcgactaggaacacaggcgatggagtagagcagccgggtacaaccagctccagctgctggatcatatccacacctgacatgcccatgagatccagcgtctggatttctgtggactggtcgtctccaccgagaagccacagcggtggggagtatgtcttccaccagaacaccgttgcggatggtatgtacggtgttggactagatgagacgatgtcgcgcattgctagctgcgtgggaacgacgccgccttggtggtagacgcccataaggaagcccatggctgcgttgaagatgacccatacaacaacgaggaggcgggagccgcgcatggggaagcagctgaggaggaggggcacgactgggaggaggaagcgtggttcttggtgcggaaagagggagaggagcatcgttgcagagagcgcggagagggcgcgcacattgcgcatccagtatggtattagcggccggctgaaaagggagactatcattgcaatgtaggctgggccgaggagttggaggaggtttgcagtgaagtgttggtagtgggggtggaggccgtgctgggctaggttggcagtgtcggtgttgtagaggaggttgttgaggggagttattatggggtggcggaaaacgctgaggaaggaggcagttggccggtagaagatcgtgtctgtgtagatggcgatgaaggaaaagaagagaccgaagaggaggaatgctgcgagcccgagtggtctggcgcgaaggcggggttagcacatgtgtattgatggatgagctggaggtaaaatgtatgtatattgacgcacttgcgctggaactgaggcagcaattgcagacccgggaagagaaggaaagccgggaaagtgatgcggttgaagacgcccactacggcgatgaaggcaagcacggcatgggagaagaaggacgagtgtcgctggagctaaggttagcatggatggtgcgctttggagctttatctctcccaccttattgttgacaatgcgccgaatcaaaaccagcccccaggcaaccaacagggtctcgaggctgttggaaaatgtgtgcgtctgatacgtccaggtgacatacgatgaggccaccagcaccactgtcgcgcgccgatgacgcggagaaggcactagctcatagatcgcccagtcctcgaggacaaaacttaataggaacattccaccgcgcagcgcattgtaaatcatgtggggtggggggctgccctcgccggtctcggtatagaaccatttcaagaggttcattggaagctcgtaggccgcccatattgggaatatgctgcgaatggggtgttcaacggtgaattcccatggtatcttcgacggaaatgagaatatgcgacctgtattcaggcgacttggtcaatgtttgttcttcgtataggagagtcgcggaattgccggatcgcgctgttttgctttctgctttagggaaaatcgcaacaaagagttcctcgcgtccgtatagtcgcagtatgatcgcgattggtggggcgatcattggatagttgaacatacctgcgaaaagctctggaccttggaaattctcatcaggatgtagatagcttggagacagcgcaaagtacacccgaatcaccaacaacagtaaatatgttcgacgccacatggttggagaaatctaggaacattattagacgaaattaaagaatgaaagtaaagaatgaagtgaagggagaaaggagggtgggctaacactaacagaaaagaactagacgcgtatcattggatgatatcactgtcgcgttaagcggcaaattggagcggagattgtgagaggcacttatagatctattactgtgagatttacattgagatatatctgtcttgatctgctctgatcattgaagcctagagagtctgttttgaaagtgacgtaatgtttttcaccaaaattgtgcacgacttaggcccccaaggttgttctggcgctccatgagaagtacgagtaccgccagactccagactagtctgccgcactcgggttcggaagtcccctgcgatagtacagcccgggccacaacagtcactggccattgccgctgaggatccatagatgaagtgggctgtttcctcgtattcttattctcgtattcctatgccgaatgccctaacagcggttccgtctcccttcctcgttatagcggcttggctcgaagcttcaaatcccctagaccacattggatcgaaatattattcggcttggtcttggcatgcatctgccagcaccgcagagtggtgttgaattcccaagcgagttggcttcttggcaggctgctgctgttgatgtatactagggcatatgcgaccggcttgcctggatgaacaggcgtagatgatctagtctgatctagcttacggtcgccggaagattgagatcgcatcttgactcttgccggttgcctagagaaagtaggaatggctgaaccgacgtccatctcgggtggattgcgtgccgggccggtattaaaggtggacgttcttgcacctcatgtgtcatggtaacatctctgttgaagaggtatcattacaggccattgttgaagccaatatagttgatctggctatgtcatcgacaaagcgggagcggttactgtgctccgctatgtaatgctccccaatccacaaacgagatttgcacttaaggagtggtggtggtagacttcggggaaccacttttcgcagacgttctctttttgcgacattctctgtttatagacgttgtcttttgtagaagttctcttttcatgtttcgcggaagttttcaaaggacgcaggcgaggtaatagagaagctctgccataaaacaaacaccatcgctcttatatttcattcataaaccgatttgtgagcctaatgaggcatactcctagcccttttatatagttactgttctactatgatggttagtttttctaacacgttactttatgctgtgacatcatacaagcacttattgtacctctttcgcgcttgggccattcccaattgtgcttcactgcagcgaccagcccttaaatttgcccgcctgaccagaagatatcgtaaatctgtcctaattggaaggaatcgaagtagacgtagtaaggcgacttcctatgaaacacatgtttgaagcacgggtctgaagtgttcccatggatagacggattttgtccgtaactactttaggttgactagaagaggttgtagtttgttcgtgtatggataattagaacagagcaggatcatatccggctggtcaaatccattttcaatagggttgtctttgagggaagcctcgatgtcgatatctagatccttcgagaatatagatccatacatgtttagcttagtacttggacaatctactccgtacaaagaatataattcagaaatacattacaccttttaccaaaatacaaattccagccgcccagattcttatttcagcccgtaaatacggacagccgccgttggttctggcttagtacggagtcaagccagcgcttccaaggttgcattcccaactgttggctcaagtcacaggctactagtctgtttttgaccaggttctcgtttctttaaatcaaaagaatgagtcaaagcaaataattggtctgatttaggcaacggtccgaaactaagacgtgggggctggctttgtagccttgtgagccttattggctttatggataccgaccgcctttggtaacttagaactccctaaacctcatcacccgccatctactcgttacgtcttcgtcattttcaacctgcaacttctctcttcagacacaccaacttcgaaacctggatcttttcgttcaataagcctacacctttccacgctttttctacgcttggtcagtaacatcgccaccaccgaacgccccgcactactcgaaaacgaccagcaacactaacttcagaacattagaacccatctccaacatcataaccatgagtgctatcaccctcaccagctccgatggagtcgatctttccgttggtaggcataatttccacagcagtcgcgagtggagctgacagattccgaacagaacgcaccactgctgagcgctccgtgctgatcaagaacatgcttgaggatctcggcgactctggagaagccattcccattcctaacgtgagtgtctatttccgagcatagccaccatccaagatcagccgcttacacctctttgtccaggttaacgaggccgtcctcaagaaggtcatcgagtggtgcgagcaccacaagaacgaccctcctagtgctagcgacgatgacgacaaccgtcgcaagaccactgacatcgatgagtgggaccagaagttcatgcaggtggatcaggagatgctcttcgagattatccttgtacgttccgtttgcagacttgttcttcggtacatttactgactgttcataggccgccaactacttggatatcaaggccctccttgacgtcggctgcaaaaccgtcgccaacatgatcaagggcaaatccccagaggagatccgcaagaccttcaacatccagaacgactttactcctgaggaggaggatcagatccgccgcgagaacgaatgggctgaggagtaagttgccaccaccgtatccattgattgaatctatgctgacatcctgcgctagtcgttaaatgatgataatgtgtctgttctctctttttaaaacagaaaatgatatcctcccggctgtttacgacaatgtgcagcgtagcccttgatgtcaaagtagggtgattgtttttcggggcgttcttttggctatttttcttcccacggtagtttgatatgagttgcaaacaatcgctagccttgccaatggcatttgttacagtcatcctcaaaacagtagcattagatagcggggcggtgaagtcgatccttgcttatatttgtccaatgacgagaacaggttgtaaaataagcatataaacgcagatcaaggctgtactacaaatcgtgatacaacagtaacacaccaaccaggaacagacagcatggaaatatctccatgcaatgccccatcataatctacaaccaagaccaccccaaaagtaggcaaaaggacattcaattcgatccaatcagattttgtatcaaaaaagaaaatcccccgccacgccagtcctacaagcccgcccccaataaagaagacgatcagcccccaacagcaacaaacccttttgcaaacataaacccgggcctgccatccatctcgacaaattatgcgtgttggaaatccatcatatccccactcggaaccgtggagaaaaagcatgacgacccattggaagattaagaaaaaaagaaaaagataggcacgacccaaagcaagacccggatcaagattttgataattgaaattttttgtttgcaattgcactcaagagtagttccacgatccactagcgctctcaagttcatggtcaaggcatgttgttcgaaattcggttgtgggcgtcacatcatgaaaagggtttcggaaaaattaatcatcagaaacccttgaaccaccccaacacagacacacttcggttgccagatgacatcgcgagctgaactgggacttttgggaatggccggacggagggtgcgaatactgagggtccgcttagaccttcagggtcgacttacgccagtgtcggcgcttggcgttgtatctattgtagcattgtatcagccatgtgttcgattcggtatttctgtatttattttcccctccatttctgggttcgtgcggtcggcgcgtgcgcggttatctgtatttccctctcgcgtgcaccgtgccggtatcactcttcccacaaatggcggtcgcggatatatagaaatggatttggatctcgagacgaagggtgcgatttacctgatggtgttgccggtgcgcagacggatccactgggggatggggcggttctgacgctgagctttggcaagcttttgcttggtgcggaaggtcttgttgctctgtgtggaaaattgacgttaaaattttgtttctcagtgttcagagttctgactggggagagaaagacggcgaagatggcgcatgtatttttcgagaatggcgggaacagggtggtaacataccggcatcttgaaggttgatcgcgacggcgagcttgttggatggacggatgaagttatcgaccttcgagtgtggatggtttgtgtgcggcagggcttggcttcgcttcggttgggtcaggtgatgtgggatttgtgcctgaggcggtgaggccctaaggcttcaaggcagaacacattaaacctggcacagtggtctaatgctgtttaggccgagtacctcttggcactccgtttttgaatacaacataattatataattatacaattagttaaatagtaagttatctaagctgtggtattcatgtccgagaacaaaagagcccgttatgatgatatggctagataataataacggctaaaatacggcaacctccagtttcattccttgcaaataagccctttagaaggttatcagtcaggggcctcattctcgtgcgtctagaacatttgctaaaatgcagccactattcaatccaatctccgatgtatgtgatacatactgcctaagtactctatactgacagtctcaccaacagccccgaagctatgatctggagagagacttcccgctagacggaacggaccttgactccgtcacagacgagactctagtgacccttcttggctctgttcctatgatgcatggcattcggtattgaaaggcggcggcagtgtcctaccatgcgaagcagagatgctcaaattcgttgcgatcaaaaccggcattcgagttccacgagtccatcgttcatttcaagttgaggatgagactcagtattttagcacgaagcgatatatcgtgatggattttatcgcaggccaatctctcgacaagtgttagaccgacccactcgataataaccaatgacaaatcgctatgcaagttgcggacatgatcaaagagatgcagtctattgaaatcttgcagccaggccctttcgcggccggttcttcacggattatagcgccggtccgtttaaggactgtgctgaactccaaggctggtttaaccacaaacttgagatctgtaagcactacaacaaatgtcctaaagatatcccgccattccaattcagcacctttgtccttacccatcaggatatcagtcctcgaaacctagttctagaccggaatggagaagtgtggttgattgattgggcgaatgccggtgcatatccccctgcctttgaaagcgctgcattgatggctcagcagtttttccccggcttcaataaaacagttttggctgttattccacgatttcctgaggaagaactgcaacttgattctattacatatgggttgattactgcggcattggcctaatgaggtcttacatgatacatgaatctgtgtctttatgctatgattttggcattgctccagttctttaacttgctgatggtcaatgatccgcggcttacgcggttcttagcttgcttataccgtagtaccacaaacaggacattgcaggatgcagcaggatacaaggtggcatagtacctcgagtgattataacgattcctttgactacataagataaagcactaaaaaagacaattcatagagcccgacctaatttaatggtatgggaccttctatggttcgttccattaccactgtctccctcctgttccattatcactctctccctccaaattaactccacgtagtggtccaaacactttctctataccttttctattatctcgttcctcggaatgagctcggatgtccctaccactgcccttactcccgtcattgtacctgaattagatccagcctcacttgcattggatttgaaaaaatcctatgaaggccaaattccactgccgacattaccaaagccaaaacagcagatgagatggaaacagtcggcaacggatccaattgacaacctcatggatacgccaaaaggttggaattccaatgaacccgatcttgatcctaagtacgtatttcccgttatatccatatatatacatactgatatatactatatattgatctggatgctcagattgaaaggtgccgtgagcggatcgaggacaacatcatgagccagttatttcaatgaaagctggaggacttgttacgagagcagaaacgtcgcaagtgagtatcccctgaaagcctttttcttaaccgggtttaagtaaattatcagtgcgatgacgaccttagagccggctggcttgagttggcctgtcgtccagcgcttggacacccttaaagggatccacgaacacattctcagcgagaatgaccagtacgaggtggttggtaatgtgacgaatataatagcagcatatcgattgggtcaattgagatggaatccaggccttggtacctaccagtctaagggcgttcaactctgccagccgaggcctttcagatgggacgaaattaatctcattgatgccaaacatcagggtcacaaaggcttttgggtcgaaggggtacgtcttttcaaacaccaaacttatcggaaactaacatagcttcaagggccagggccaacccaccaatgattcaagtttaagctgagccacttcctacaactggcctgttcagacaggttccaacaacgatatgcaaataatcgacgaggaatcggatagagcaatcatcatcgattttggatcttgccggaagctaggagagagtctagaaaacgtcggccgtacctacgaatggtacaatggtgaagtgtagaagtctcttcccgagaatgacttgaacgccttggaagaaattcacatttggcttggtgttagttctaaaggggttcactttgaatagtaggactgggcacgaattcgtattctgctctagtgataatatcaaccgccgaagcgatatactacaaatacacgtccatctagagtctagcactctttaccgaactaagagccgtacgggttcctgggaagggctcctccccccctttttcttcttttcttcttgtcttctctccatccctccgaccaccatcttcatgcaaccggtggaatctgttcttcaaaaacagagcaagaaaaggaaacaaaaatgcaaaggtacgcgtctgaaaggcatgctgaaccttcgaaccactcatcaagcacacgtgatgttgtatgacaaagatttaatcgttcaaggcagccatctctaacccaaagagtgcatttcaacctgaacattgaaaacaagagaagaaaaaccttggaataaaggaaggaacaagggtgcagggtttcatgtgtgctttccctgcaaatcttgcaaccccttgatcacccgatttgctcttctacaggaagggaaggaatgactaaacaggaaggatctttcagatcaacaatcatgtcgaatttccgcccagttcactttgtgcctgcaaaccgtcaagccgagatgctggctctgccagtactgaagatctttgccgtgcctcatcaacagcaagccggtacaaaccactggtgcttctatcttatgacatcctcagacacatccgttcagattgattgtcaaccaagctacactgagcctagttctgtccttcggggaggctccaaagccaacctcgtggtttcggaattatcatgtcttgttcccaacgatgctcaagagcgcttcgagcttgatatcacaccagggctcttagttgggcaagtttatgacctcatcatccagaatgcacgccacaagtacgaattcgacatggatggcgtcgggtgtaggtgctgggccaccggccagcttggtcttttccaccaagctcaaatcattaccaatgaatcccaagttgcggcgacaaaggctgcgatcttgaagttgtggcctgagcagacgccgctcccgcttgaccaaggagcctattacccatgattcaatatttgtgctcggtttcatatgctattcatggaagtgctattccatgacttatcccgatttcggtactacttttcttacaacaaatgaccggaaatagccaaaaggaagcggatggttacggaatactgagactgttatatatggaagagaaagaaatctaatgttttcgcagtcccggaaatattgcgctcgcaatttggtggctgcccaagcaccttgcttcagtactccgtaagcaggttcaaaccagccttaaccgccatatttacctcgtataatcgtcgacggctatcgtatagtagggtaattttaggtagaagcattggaattgtgtctgtttagcggaaagtagctttggggctgtgggtgagactgtcattatagagtgaatcaaatagggaagtaggaaacatccggacgaggaaggactcagacatgaatgagccaatcaacatgtctctcgcttgacgggcgaatcgttctgggcaccttgtcacatccctggagatttgttgagatcacaactttgaggtgcataatgtgtctgtgcgatgggcgcgttcaaaatacttcccatcaactcaagcgcttcgatttattaccaccacacttaaacagtcaataatacacttgtcagcctgaatcatgtcatcagttcctattcgaaattctgttacgaaaatttctgattccatttggcgccttggctgcacaatcgagtgcaatcgaactgcggaaccagatgacacatgcgcagcagcctggaaagacggagaagattggtatattcttcggcatacaacatctgagcaactacccgatgctacgtctgcaaattcaccggttcgtttgatccacgaagggggtactctatctgcagtgtgggctattggaaataatgccatctgcaaagtccaccctgggaccctaataccacttcagagagcgaaactatcaaattcgttcaagataaggcaccccaagtacctgtacccgaagtaatttactcctgggtagatggaaatcgatcattcttggtgttgaaaagagttccgggtatcacgctgagagacgcgtgggaaactatgtccgctaccgaacaagattctatcttggatgaggttgttcacatgtacgatatactcgcttctattacttcggaccggctcgaggatgtacatggaggtccagtgtccgagccttacctggctcactcgaaacgggattcattggagccgttgagtgtctgagtgtaagacatttcttccgagaggatcttcatccaaatccggagattgaagagcgattccatctctatcaccccgatcttgcgccaggaaatataattgtttccaatcagaagctattggcgatcatcaactgggagagcgctggattttacccacgtttctggatatcaaccaaaccttctatttcccggggaatgaactttcatccgccaattccaggtattgaggaaactgaatggagaaagcgactcagagtgaaactcgaagaacacggttaccctcgatttgcagattggttcatggaatggatgaggacaaaatctagataggatagtgatttaagcactttttggttaatccggggatagatctatatcttcaccctctatatccttgatagaaaccatggcctctcatgagatagcactgggaaaggcgcaaggtgtttatctcggtcaaacctcacctgggcaaggagacatgggcaacaatcaatggccttgtccggagtaggtaaaaggagtaaagttgcagtcaaagcgtcgggcatcgggcatggaaattagccgacgcataaaaaaaaagtggaaaaggtccagatcgggctcgttgcggatcaaaaattcggtcgaaataccccgtataatcccagttatgactcaggtgttcgtattcgttttcgcgtattgcgttttgcgtcatggtgatgtgtttcgtgtcaaagtcaaggcatagtacggagtatgtgtgtactatgcaactcatgcatgcgccaatcataccggacctgcgtcaagcatggagtaatgtagctcgtggctgtcaagtcgtgttccccggaaaagggcgcgttcaagggatgcccttgcacgaggaatgtgaagaaaggaatgacccgcctgacctgtaactactccgtaactagttagttacttggaagccgattagcaatagagtcccggagatagaggcagggtctgccaggtctaggcagcacttgaggttcgttgcataaaagacacgtcggagttcggactacccgacccgaagagaaaaaagcccaagccccctcataagtataatctcagaacaaacgcatttagagcctcccatcccttccttcacccctgttgttaatctttactcttaatacaattactcctacctttgacatcccttaatatctgtccctttgtacctagctccttgattcatcgcagaaccacacctcttcagaccatcctcaaccagttcttcatggagtagagatccaaaatcgaaagtttcaacatgcagcagcccgaggagggcgtgacggccgttgagaagatgggggactcgcagcttaacgagaagcccatcgacaagcgcgattcggataccgcttccgcatcaacaaaggagcacgaaagcacgaccccagtcgcgacagacgaagatgcgatctatgctcacttgcccgagcatgagaaggagatattgaagcgacagctagatgcaccgctcgtcaatatatcctacttcggtctatatcgctatgcatcccgcatcgacatactcatcattgttattagcacactctgcgctatcgccgccggtgctgccttgcctctcttcaccattctctttggctccttggctacggctttccaaaagattatgctccgcaccattgcctatgatgaattctaccaccagttgacccacaatgttttgtacttcgtctacctaggcatcggagagttcgtcactgtctacgtcagcactattggcttcatctacaccggagagcatgtcactcagaagattcgagagcactacctcgaagccattctgcgccagaacatcgcctacttcgacaagcttggtgcgggtgaagtgactacccgtatcacagccgacaccaacctcattcaggatggtgtctccgaaaaggtgggtttaaccctaactgccgtcgctaccttcgtgactgccttcgtggttgcatatatcaagtatgcccccttggctggcatttgtacttcaactatggtcgcgctggtcgtgattatgggtggaggctccagactgatcatcaagtacggcaagctttccttggaaagcgccggtgccggtggaactgtggcagaggaagtcatcagctcgatccgcaatgcgactgcattcggcactcaggacaagctcgcgaagcagtacgagtcccacttgcgtcacgcagagcgttggggcatgcgtctgcaaatgagcctcgccgtgatggtcggtattatgtttggacttatgttcatgaactacggcctcggattctggatgggatctcgattcctggtggatggtaaggttgacgtcggacatgtcttgactatcttgatggctattcttatcgggtctttctccctgggcaatgtcagcccgaacgcctcggcatttaccaacgctgtggcagccgctaccaagatctttgcgactatcgaccgtgtatccccgctagaccctacttctgatgaaggcatcatccttgaccacgtcgagggtcacatcgaattccgcaatgtgaaacacatctatccttctcgccccgaagttacagtgatgaatgatgtttcactcgctattcctgctggtaaaactaccgcgttggtcggtccttcgggctctggcaagagtactgtcgtcggtcttgtcgagcggttctatcttccagtcggcggccaagtgttcttggatggccacgacatccaaactctcaacctgcgatggctgcgtcagcagatctcgctggtcagccaggaacctgttctgtttggcacaaccatctatcaaaacattcgccacggtctgatcggaacacgcttcgagcatgagcctgaggagaaggtcaaggagctcgttgagaatgccgctaagatggccaacgcacacgacttcattattgctcttccggaaggttatgaaactaacgtcggccagcgtggattcttgctgtctggaggccagaagcaacgcattgccatcgctcgtgctatggtcagtgaccccaagattttgcttctagatgaagctacttcagcactggataccaagtccgagggtgtcgtccaggcagcgcttgatcgcgctgctgagggtcgcactaccattgtcattgcccatcgtctatccactatcaagtccgcgcacaatatcgttgtcttcgtcaacgggtcgattgttgagcaaggttcccacgcccagctgactgaccatgatggtccttacttcaaactggtcgaggcccagcgcatcaacgaggagaaggatgcagatgctttggacgcggatgaggatgagagtgaggatggcaagcacatggccaagtctcacatcgcacgcgtcaagtcagttgctagtggctcaaccattaggaaggatgaggccgaaacattccaggagacaatgcatcgccaggagtctcgcaagtccgtgtccagtgttattctctcgcagaggactgctgaaggcgccagcaagtattcacttttgactctgatcaagtttatcggctcgttcaacaaggaagagcggtggttcatggccatcggtcttttcttctcgattctcgccggttgtggacaacccacccaagctttcttgtatgccaaagccatcagctcactttccttacccgaaagccagtatgccaagctcagatcggatgccaacttctggtcactgatgttctttatcgtcggtattgttcaaatcatcaccttctcgtcccacggtatcgccttcgcctttagctccgagagattgattcgcaaggctcgcagcagcgccttccgagtcatgctccgacaggatatcaacttctttgatcgtgaggaaaatagcaccggcgccttgacctctttcctctcaactgaaaccaagcacttggccggtattagtggtcaaactcttggaacaattctcatgacttcgacaactctcatcgcttcaatcgttatcgcactttccttcggatggaagcttgccctcgtttgcatgtctgtcattcccattcttctcggctgcggcttctaccgcttctatatgcttgccgcgttccaggcacgttccaaggtagcctatgagggatcagccagctacgcctgcgaggctacatctgccattcgcactgtggcttcgcttacccgtgagaccgatgtctgggcattctaccacgctcaactcgataaccagggccgcaaaagcttaatctcggtattcaagtcatcgctcttgtacgcagcctctcaggccttggtcttcttttgtgtcgccctcggcttttggtacggtggaactctgctcggtcaccatgaatacgacgtgttccggttcttcgtctgcttcagtgaaatcttgttcggtgcccagtccgctggtacagtgttctccttctccccggacatgggcaaggccaagaacgccgccgctgaattcctcaagctgttcgagcgtcggcccaccattgacacatggtcagaagcgggcgagaatttggaccattgcgagggaactatcgagttcaaggatgttcacttccgctaccctactcgtcccgagcagcccgtgcttcgcggcttgaacctcaccgtcaagcctggccagtacattgccctggtcggacccagtggatgcggcaagagtaccactattgcccttctcgagcgattctacgatgccctttctggtggtgtctacgtggacgataagaatatcgccgacctcaatgtcaattcttaccgcagtcacctggcgttggtcagtcaggagcccactctctaccagggtagcatcaaggagaatatcctgctcggtagcgccaacgcagatcccaccgatgaggagctagtccaagtctgcaaggatgccaacatctacgagttcatcatgtctctccccgatggctttaacaccattgtcggtaacaagggaggcatgttgtccggtggccaaaagcagcgcgtcgctatcgcccgtgctctccttcgcaaccccaagatcttgcttctggacgaagccacctcggccctcgactctgagtctgagaagatcgtccaggctgctctggacgctgccgctcgcggtcgtaccactattgccgttgctcaccgtctcagtacaattcaaaaggccgacattatctatgtgttcgaccaaggcaagattgttgagagcggcacccacaccgagctcctgcgcaacaagggtcgctacttcgagctggtcaatctccagtctcttggcagggccgcctaattcctttggatttgctttttaatatatgtacacatacccccttcttcctttcttaattttatctcacatctccctttctcaatcttcttcattcttgttatagatcatttgttgtcaccagcgaacacccggaaaccagggtacactgtctcctctcgataaagagaaaaaaatcaaaaaacgtccattagtgatgtaggattagatgaatgaatacaatgaatctcaattcaacgccgcccggtttcttcgaactccttccactcagtaaaaataactccttcaaaccgtttcaagtccgttccatcagtaaatctctcgcattctactacttcaatcctcctccgaaaccccgaactctctctccacctcaacctgcctcacccccctcgcatcagcaataagccccatcaacccctgtccaacatccttgatatcattgtactcatgcaagagcttggtataccgctcgcacgtggtattaggatcgttactggaataagcagtggttagagatggaagatgcaatgtttccatgttcttttagggccgtgtcctccatagctgcatgcaattgggagagctggggagtgtttacataagctgcgtggtcattgtagttagatcggcttctaaaaccgcatgcttagcttctaggcttgcaatcgaagcgcgaagggcgacctgcgttgaatgttagtgtttgatatgatagacacgggtggcggcaaggtggggatactaagaacgtacgattctttgctggtctttgtaggacttgggttccttggctgaatccatggagattgtttgcaattaggtgcatatgcatatgtgttgtgatacgtcagacgcaggagatgagagcattgtaagaggagggagttatccatgtcctccgtaccccagaattatatactcctgaccaatcacggccatgctgaataatccagttcaaggcttccaaggtttgtgcgtgcgcatccttaattttgctatgagtttttgttatttgttaagtgttaaatgatagaatagctatatcactttgactcgagagttcctgagaacaaaaagacattgttcctttgcctccacgcgtcgtttccgccttaatcggatgccccggattgggtttaactgttatccgcatctgttctcttctcccttgcaactccctctgaccacaccatggcatatctccgtcagtccttatggactttatttgtattagtggcctcggctctcgcccatggcggccacgaggctgttcctgagggcgaatctatctcccaggatcctatcgtacgtcctactacgccattcccctcggcaaaagttaacacatgattccaggatgcaacactatggactcatatgattctcatgggtttggcatttggcctaatcttcccaacgggaatggttctcggagtatgtaccgcttcactgacctctccgtttccttcctaccgtcacgtcacgtcccatctctaacaaaagaaaatagatcatccgttcccgctggcacgtccccgtccaagtcgtcggcaccgtcatcgccgtactagcttacttcctcggccacgcccacaaaggccgccaattcgacaagaacctgcacgcctccgtcgcaaactggctgatgctattgctggtcgcgcaagttgtcctcggagtatatctcaaactgcacctggagaaggcgggccaggcccgcatccgatggatcttcgtgctggcccacggcatcgtcggcaaggccatgcccgtcctcagctgggcgcaaatgctcttcggtggcattgccgcgctcggcttctgccgcgatgaccatctcggccagtgtctggcccatttcattatgggctccgccttcatcgcgtacggtatctgtttgaccatcctcttgctggtcggccagtattggttgcgccggaccggccgcagccaggaattcttcgattccctcatcatcgccgcttggggctgtgtcaatacttttaccgaacaccgctggggttccgcttgggtgcacaatgacctccagcatactactatgggcattatctggtggtgtgctggtctgctgggtatgtggctcagccgtactcgcagcggacgtcctaagcgtaacctcattccggctattgtcatcttgattaccggatatgctatgtcggcgcatccccagcagctgatgatcagtaccatggtccacactatcttcgggtacaccctgatggcggcgggtctgacgcgcattattgagatctcgttcattctgagggataagcctgctctctccgagccgaacagcttccaatacctaactcctttcgtatgtatactctccggttgatgtggtatataggatgatactgactcttttctctttcagttgctatatgcctctggcttcctctttatgggcgccaccgaggagcagatgctcctgctaaacaacgcaggcgtcacccacgtggcgtacgtgttggtcctctacagcattgccttcatcctcttcctctgtaagttgattccctgctttcttcttctagaacaatcactcatccttcccttcagtcgtcaacatcctgctccacctctacgctgtccacgcctggcccaactccgagtccaccaatcaggacggccccatgtactccactctcaacgggaacgcgaatgtgaatggccgtgcacgctcaaactcgcagcagatccaagatgccgaggcattcgagctccatggtttgatttccgatgatgatgagggcccttccatgggaccgcggaagaatagcgatgaggaacttggaaaagaagaggcccatcgctgaggccgtatattgattcgctggttcccttggcaagtatatcgtgcattttgtgatattgtgacggcgtctaggttgggttgggttcggatagcattgcaggtcctaaaaggccttgaatttgagtagctaatattatatctgaacaaaattgtacattattctcaattccatgaagcatcaatggttgctcgtgttctatcgtacataatgatacccggatctaagctcggaaaaaaaaaagaagattcgtaatatggtaaagagtcctcccagtccagtcccgcttattccaattgccttcagtgatccacggtaatcctacctggcggcacagcagccatatccagcgcaccaacatcagggaagaaaggatgaagtgaataaatcggaccaacgctcttttccccgtcaaacagcaacatattctgcagcggctgctccctcgccgagagaacattaataacatcctgcgccagcgcaccgcccaaaaacgccgctacgggactcagctcgctgcccaggttctgcaggaacgtccgcaggaacaccgagtccagtgtgagtggatccagcttcaattcctggtgtcggtctcgcgatagcttcgtgaatagttccaggtcttcatgggtgaaggttgggcggtggccgcgtagcttttcgaattcccacaatgcgcgcaggcagctgagcagtggggtgacttgcttgcggcgccttgcaagtcgggtgtattcttccgggagtggggaggtgtttgcgagaattagtggtgagtacacctcgcgcttggtgacgagctcgatgatcttgcttggttctttcttgttggcgttgttctcttcttttttcgtggttatgtcgatgatgctgcgggtgggtgtttcttgggttgcgggcgccatgttagatttgctgcgctcgatcacgaagtcgtggctgattaggtcggcgaagacgtagccgtagaagccgtgtagaccggcggcgtagaagggtctattggctagtcggcaggcggcgttcacggtaatgttggtgacgaagtcgagctctgtggcaattgtgatatcgaattgtgcgaaaaattcgggtgctttggtgctaacatcggatgtgtcaatgttgagcttgactcgagggttcattttgtggatttgcggtcctgcgacttgcgcgcgctggagtgggttgtcagcggatgcggtagggactttgctctgttgtagctcacgttctttccaatcacatcctgctcactttgcgctgcggcgataaaaaactgcgcgcccaggtcctcctctgtgacgtcctggtggtcgagtatggtgagtgatccgatgcctgccaagacgaggttcttggccacttcatttgcgagagctttcacagtgataaggaggatgttcgccgagcggattctagccgttgttaggacatgtagtgctttgcaagctggattgctcacttttcctgcgcgtgcactccccacagccggatctgtcggtcgtacagtgcgatttcatctggcaaagtcagtaaggattgaagcagattctagttattttccataccagcactgatggcctgtgtattatcttgttgctccgccatagtgtcgatcgagtacaatcttgcccaggtacgagcttggcgatttaaagcctcgcagttgtgtttcggggatctgctatcaagtgagaagcactggttcgatgacttaatgaggggcgcaatgagaatggaagttgtaaggttgcagatggaagttcagaagttcaatgatttcaaatagtccaagaggtaaagaagttccgataggtttaaatgtcaggtgacccgggagctactgtgtggggccgtggggacaaagaagtatacaacctcatgcggacgaggatatctgtttcaatatattcactgaatattgatagaatatgctagttagatggggatcacggacatattctcagaaaaatctcaacataggatgaattaaacaaacagttcaagtgtctgattttatgatatcattgtcttaggctagttataaatagaggctatatcaagtcaacaaatagaaatttgcataacacacgactcaatcagcaaataatacgaagatattcacaagtatgctctagctttatcgacaatgtcctctacaatactgtagagcttttctgcagaacttcccttcctcgtgttctcatatcagttttgagcatatgagttctaagtaacataatgatagttaggttgagaggtaccatcttctcaccaatgagatttggctttaagtattatctaaaaggatattgaccaacattccggaggccactttgtctttgatcctttatcatgggaaagtataaggtcaaagagctaagtgacacaattaactatcaccccatgccggatgaaggtgtctacacggagaaagaaagcacggagtgagaactgcaagattaatgaaatccaaaatccaaaatccataaatacaatgaagttatctctcaacctcccaccttcactccactatcgatgatataatcgaccatcacgtgttaccaaccttgtgaactcacaagaccaactcttctccgaaacactttattttaccagtacgttaatctttttgggtttctttgatttctgttgggttagttctaagacgctatctcctaccccatatccccaacccaggtaattccacctcaagcggtactaacgagcctgaacgatggtatgtctctcatggctatgcgtccgactgatgtctcacaccttcctttagtcagggaattacgattaccctcgtgcttcttcctcttcaacccgccgctcccgcatatcccgtcattctaggcctgacgagcgccctgacatcctccgtctccagcatctccgcaatctcgtatcggaacgaactcgctccggttcttacaacgcctacaacaccaactttgccttggaaacattaaatcgagaaatcgctgcgcattctctggaccgatctcgcgatcgtaccaaccttgagcaagctcgggccgacgtcgatcgccaactgcactccgagacaactggccccgcagagccaactcggagcatttggctcgaccagattcgttcagaacgggctcgaacttcgctctccccggagtcacattcccttcgccatcgtttgccctggcaaacgttccgaccgccaagcccggacggatctttatccaggtcaccgtctttcatgccaccatccggccagtcgggccgtgatggccaaggacggatgaagcgtcggaagctggacaccgatgataaccgcgaggaatttcgaggcttcaactatggtcaatatgggcaagtactaccgggaatgctgcaaatggaaatcgctagctgcgacggaggaagctacgatccggatagcgggtgttcgcgccccgagaacgttttggacaacaatacaagcgtgtactctaccagagaagcccgctgcaatttagtcctctgtcaccggggcgaggccccgttctgcttgaagaagatcgttatcagagcccctcaatgcgggttcgacgctccgtatgtctgccaggcgtgtctgtacgttggactcatgactaatgaaatgaaacagaatacaagaaggtatggtattcgtcgcgatgacctctgatgaactgcttgcccgcaccgcccaataccaaattcaatactctagcggccgataccgccgtcgagcccgccgcagtggcatgcaaccatcccaggaatacctcactgggttccggccaccacttcaaaatatcgaacgcacagttctcatgagcccacattcagccgctgttccgcataccgcagaagacccgcaagcgcagttccgcatcaccaccgagtatgacaataacgaagattctggagatgacgaagaaagttctgcatttctggagagaacccaagccgaccagatggaagatcctttatcgtctactgatgagagtccaagcgatgaggatgactcttcaagacaccagagtcgccgacaggttcaatcggaacgtttgagtgccctcagccgtgtttctgagcagagactacgccatagcccgagtcttgtgcatccacaccccctagccgagcctgctcatccaactgccgaagttttgaagcctcatgcgcgcttcttcatcgagcgagagaagagcatggttaccattaaatttgacccacccccgtatgtgtcattatcattggatgtggataaccgaattttaacgtttccaggtctggccggttcattctcatcaagctgtggagcccgcgagcccacgggaatattgacatagaaagcatcatcgcacatggatatgcaggtccgcggttcttccccagtctcgcttctcgttaacggtgggaacaaagagttttgatgcattttggatcagagggatagaagcaattatttctcttttggtgcatagtttttcagcccagactgtcttactaggtcaactagtaagacaacttatcatgattatgatatgactttcaggattattctttattctgccctgatttgttccatcgtgcaattcatcgagatcacactaaatacatttcgtatgtgggatcaaaaggtatgaccacttgatcagcctttaattagcatctccaataccacatttccaaggaatctttcttgatatatttcttgatagatgaataggctatcttctcttctcggccaccacagcgtaataggtagtagcatgtcgtttccaattttccatcaggctccccttcgatcaaggagaagttggcgccaattaagtacctatataggcccactggttgccctggaagatatactcggcttgcaccagcatcagcgcctggctttggaatgatgcgagaggagtctattggagggactggtttttcgtttgaataaacatggttgaggtaggaagatggtgagagttcactgcgagtgtactttggagtgtggggggctagatacgggacatagccctaattatttcaatgtaaatacctacggagtacaattccctgcatgctatcttaagatgatacatgccctccgaggtcctcgacacatatgttgtacataagtatctcttcatcaccggctacgacgtccgccacagcgacgacagcgagtgtaagacccctcaaccccactagcctagaccatatcgttgcatgctgtaccgccgtattaaatgcaacttgccatttgaagaaaggcttggtgacagcaatttggtgggggtcaagccacattatgttatctcttgacagggctagattcttatcgatgacagtgatcgacgccaaggtggttagtggggacgggggtccccggtgttccctcggctatgcgcattggtagcttgcagcttgatctaagtcaaattgcacctgtatacaactgttggaaggataattcaagtcgatattctccgtcacctcaaaagaacccgactagacatgtagaaatcttgcggcggattcgaaaaacagacaccggccgttcataggcgtatttgggatatcagcattattaggaaatatgcatcattgtgcatggtgaagatacgtgctggctgaatttcaggatcacgtaggttggccacatggagccgatccgtgtctcttcattcttatatcctgcgtggcgcggttagctagagactaaaagccaacctataagaatagattgtcaaaacgccctaaaaaaccctgaactggcgccatgcctgagccacaaacgttggaagtaagggagccaatctgaaatatgagcactaatgcacggctctagaaatggttatctcaaaaacggtcacctacgtgatagtcggaaaattcttgaatcggttgttccaaatgcatttgagcgcctgaccagcgccttcatgttgttatatgtgttcacatctgtttgtgttggcattgcaacatgtatactccgtacccgtgcgggaactgagttgtacttgacagcctcaaagcatggctaaatcccctgcatgtgttgactagtgcggggtggacaagttatcaaaattgcgacatcctcaaatagcttggggtctggttcggggctggtctggcagtggtaggacgacggaagtggtggacacgaaccaatgtacttttagaatagtagctggtccagccccggggctctcggacagtggaggtctccggtggccccgctatagtaaattgtcaaagtacggatgaagccattgccgctggcaaccaatgccggggtattgtgggatatcggacatggccgcggagtcaggaaaacaaggcaacttcaaggcgtcacttctctatccaacgatttcccgtggccctccccctggcgatgacgccaatagacccggtccgccgttagcctgtttggccaggcaattagtggaggagctaaacggctcagcgcggggctcattacgcatatgcaataggtgggaggagatcatggatgtatgggaccatgttagctgcagcgctagagtcgaaataaaagtctatcctatttctgatttgaaaggcgagagaaatagagtggatgtaagggagaggaggaggagaagaggaagctctttaaagagtcaggtgtccccttcccgctttcttagtctttccttctcccggtctctttctacttcttggcttcttccatctctctacttttttttcttctataatttatctgctttataccccttcctagcagacgtccttgctaccgataccatgcgtatcaccgtcaacgtcatccgccccgagcaggcggactcggacatcatcaacctagaagtgggcggcgatatgtcagtcgagctcctcaaagctattgtcgaaagcgaaactaccatcccacccgaagcgcagcagctcgtctacaacaaccagctcctccagaacccttctcaaaccctagaccaagccggcatcaccgagggcgacatgctcggtgtgcacgtcaccctccgagctccccagccctccactcgccccgccgcttccagctccgtcgcgcccagacagaacactcaaccccgccccggcatgccggaccccgaaacgattcgcctacacattctgggtgatccccgcgtgcgcgaggccgtgcgcaggcagaacccggagctgtctgaggccgcggataatgctcagcgcttccgcgaggtcctgcttaggcagcaacagggcgaggcgcagcgggaggcggagaaggaagctcgcattgcgatgctcaatgccgatccttttaatcacgataaccagaaggaaattgaggaaattattcgccagaatgctgttacggaaaatctacacaatgccatggagcatcatcctgagtgtacgctctacgtctttgaactgccggctaggctgctcaactgagaataaagctaaccaatatgtttctctagccttcggtcgcgtgacaatgctctacattcccgtggaagtaaacggccaccgtctaaacgccttcgtcgactccggtgctcaggtgaccatcatgtctcccgagtgtgcaacatcgtgtaacataatgcgcctggtagaccgtcgctatggcggcattgcgaagggcgtcgggactgccccgatcctgggccgggttcactccgcccagatcaagatcggcgagatgttcctgccctgctccttcaccgtcatggaaggcaagcagatcgacttgctcctggggctggacatgctccgccgccaccaggcctgcattgatctccagcggggtgctctcgttatccaagaccaagccgtccccttcctcggggagggcgatattcccaagcacttgactgaagagttcgaggccgaacctacggtcaagggagccgatggtgccgaagtgggtgcccgcactggcgcggtcacgcacaaagcggagaacaatcccaatgccaatgcgacttccaatgcatccgggtctgggtccggcgcgtcagggtcacagccccgaatcaatatccggcctgcgcctgcttcgcggtggccgcaggattccgttgccaggatcaccgagctgggattctcgcgcgaggaagccgtccgggctcttgatatggcacatggagacttggaaggggcgatcgggtttttgatttgatctatggatggattccgctttctgcatttacactcgaaggcgttttggtcgggatgggaacttgtattagcgagatttgatcaaagcacgtaatgatgtgtacgattataacgctggctgcattataatagattttgtttattgtcctacatgtaatgtaagtgtgtgctgttcattcccgcttggttttgggcattagtttgtcgcgtagacggaataccatgtctagagccatgaatccgcctatgaggtgttagtaacagctggtgagctaattgcgacattcttgcagacacccttggactgcacatacctaacgccatatagggagcatacagcatggtaagctgctgcttctccgcgaccgagcggtcagtccaactccacaccaccaccagagatgtcaatgtagtgatgaaggcctggataccgaacacgaggaggtgtacagggacgagggggtggtctagatgaattggaaattgagttagttgctgattgcgtttgccattgtcgtgtcgttcgtgttcggggagaggatattccagatattgcatttgatatagatatgtaatggatataagacgtgatggggtggactggatgataccatatacaatgtacaaatagtagcatgtagcgtgtaccaacacgagcttagaaaagaaatggaaatacctttaagcaaaccccggaccgcccatatcgagagcgggaggtggtacagcagctccatccagatgaagacggtgaaccatgttggggggtcttcaaagaatttgtcgcggtaggttgttatgtagaactggcgcaggtggtgggagaggtttgtttggagaaaagctgggaggagggggactgtgtcgattactgtattttggcgttagtgtgcatatacgaggtatgaagatatgaagatagagatagagatagagaatcatacggaggataatggggacatgggtgacgaaaaagagaagataggacaagtcccgtttacgggtgcagatggacatgatgtgctgggtcatatgcaatgcgaaaggataagacggtgctggtgctgtgtgtgttgtatacggagtatgctgtgtgtgtatgttgtgtgtggtcgaagtgtagatgtttaggggaaggggatatcaggtgacccgaggaacaatctggaagagatggaagttatagaactagaacatcgtataattgcttttttcgggggaatgctagtgtgagatcttaatttctagcgtatttcaccgagataaccaaagtcccaagtcgatatacacatccaactccttcgagtaccttgatctccatctcaccgctgcttctcaattttaaggtggcctgactggtctcctcggggagctgttgaatccgagctaccctatatccacaagggaatacactgaagtagacaaaggaccttgatgtcaaccatcaagcctggaattacatcatcgggataaggtaggcatgcagtgatgctacagggaatctccttgataacctgcctcgagagagacatcccgggaagtagaccgcaagatcgggatgccctaattagttgatgacagggttctttagggttttcctcgtttcttcccttttcttcccgtttctcctttctccttggagcttcctaaatagctcggaacagttgtaaatagtccttctaaccatatgccgaatcataatccccgcatgcatagatcatggcagataatgcaattgccattcggcctgcagcatgccttatcttcgaggtcttcatcatctaccgtagcggtgtaagaccatggaagctttggaacgaaatgaaaaaaaagcgggcgaacggtagtggaatggggatttgcatggcagtggataagtggagagacgcgtttattgcttttcttgctttattgtttttatttttatcgaaattttacttttcttcctggagagatcatttttctgacttctttttttccattatctctgaccgctgttcgcatctttccactcggagatgaagggaagcgttggagatgcgtatacagaactatatataaaatataaaaagaacctcaatcccacttccatctcttctccttatccatcttatccatctattcctttactccaccctatacagatcgatatacaatctatacaatgccttccacagccccccgccgtcccaagcagcccaagaagcaagagcccatcagctacgacatcaacatcccctatgtcgacgtagacaagcaatccaagatcacaaccaaatacccccaatacctcccctcctgggacccaatctggttcgacccactccagcccttcgaatatgaagacccagccctccgcgtgcgcaacaaatcaaaacccaacctgctgcccgcaaccgccaaagtctcgcacatccagcccagcctaggcacaatcatcgagaacgtccagctctccgagctctccgccgccggacgggacgagctcgccctgctcatctccgagcgcaaggtcgtcgccttcccagaccaggacctgatcgatgcgggcccagatgcccaggaatccttcatgcgccacttcggcaaaccaaactaccagcccgtgtccggctccatgaccgaccatcccgccttccacatcatccaccgcgacggcaacagagacgagatcacccgcttcctgcagcagcgcactacaaccaccctctggcaccaggacgtcagctacgagatccagccgccagcctatgtcatgcttggcctcctgcagggccccgaggtcggcggtgataccgtcttcgcggctacggacctagcctacaggcggctttcgccggctgtcacggctttcctggatggcttgaaggttacgcattcgtcggcgaagatgattggccatgcgcgcctgacgggtgggttggtcaggaaggatcctgttgatactgtccacccgcttatccgggtgcatcccgtgaccggggagaagtgtatgtttttgaatggggagtttattacgcggattgatgggctcaaggataccgagaccaagtgggtgttggatttccttatgaatcacctcgttgccggtcatgatttccaggttcgcgtgcgctggcaaccgaggactattgtgatgtttgataatcgctcgactattcgtgagttatttccacccccttttccctcccctggggaatgggaattggaattgagctttactaatgagatcttagactctgctattgtggactacttggatgatgataacggtgccaaggctcgtcatatcttccgcttggctgctatgggcgagaaacctattcctgtctatgaggatgaggaggacgaggagttcgaatgatcgtaatgtgatagaatggggttcggtgtttcgggattgattatagatttaatctggttggaatttgatttaacttgctttcatttgccttcatttacattcaaagattgaaatattcaaatatccattgcaatgatgatcagggctatactccctgtatccattttgactgtgaattcgttttcattaccaccccacgcctagagttacaagcagaaatcccagaaaaagcaccgatccttaaaagatcctatgtcaagtaaatctcaggagtcaccgccacgcagatctgcaacgctacatggccagtccccccacatcgccgcggcagcaaacgccacattaccgtagaatatcatcgatccgtgaccgcaagtcatgagcgatctccaattgttccccactaatgacaccgctctgttgcaggatcagcagcatctcagagacacgttcggcaacgatatccgagccgaagaccatgccgcccaggcgcacggtctcatggaaccatccactcagcaggtacagcaggtcgtgcgcgatgaatcgccggtttgacccgtggaagggcgcctcgtcggtgtagtacatcgtctccagcaccgcatacagcgattcgtgtgcaacgccaagatctaagaacagatccaccacccaggtagccgggcccacgttgcgttgaaactctaatgcataccgctccagcatggggacgagctcgcggatggggaaaatggtctcggacatgcgaagccgactgccgaggctgcggactttgtcgatcaccgcttcgtaaggttgcggtgagccgcgttgaacagtggcgtcatggatcccctggatcaggtgttgccaagttgacttgacgtcggccgcattgcgatggtcggcttggtagaagatttgaaggcagatatcatggtaactggcggaatcggcgtatttgttgaacagctaaaacatgttagtatcttgttggaacttattccgaaaaaattagaacttactgtgctaatatccatcactggcccatcgacctcgcgcaggatctcgggtttccgttcgggaagaatccgctcgtcatccttgagtctttgaagcaggtcatcctgaagattggccacgtcgatgagattcgaaatctcttgcagcagtcgctgtcttgactgacgcccgacgtccggtgtgaaaatcgaagcgttggcgcgggcttgaccgaggtactcaatacgacgactcaggggcaacacgaaagcactattggccaggtggaattgaacctgtgcagtctcgaagaaccgttgggattgggaatagaaccgccagagtagatcagcatggcctagatcatcattcgacttgcgctggaggtaggtgacgacaaatggagattgcgtctgcagcaaccgatcgctccagccctgctcgaggtaccagtcatacaaactcgtcaggaacacctcatcggtagaatcagaaatcacgccataggcttcgttctggcgtttggcaatagtggtcagctggccatcaatgagaccgggatcggatgcagccaatttgtcaactgcaagcacgactttgaaaatgagatcgtagcactgcttgcggaaatagaagtattccttgcgggggtcctgggtagttgtgagcgggagctgataccgggatccatagggaataagggggataagcacctgttcgggacgctgatccatgatccaggaatacgcaaggtttgacttgtcggaccgagcagcaacgttgagggcgagctggatagcacctaaagagaaaaggaataaccaatcagtatgagaagcaaaggccaggatcacacaacatacctgcaaagaactggttgaaaatgaaattgtccactgccgaaaccagataatccattggtaagtattccgccacctgctggaagagatgcagactctcattgagcaagttgcggcccaattcagtattggcaccggcctcagtcgcacgcttcagcatttcttgtgccttgaaaatcaccacatcctcagtactgcagaaactgccacagcgtcgtcgaagtgcatcagccacagtctcgacgttggagcccttggcaatgttgcggttaacaatgcccttcacgagttctttagcaatgtcatgtcccttgctggagctgaagagttcctcaaaggtgaggctgaggaacttcgctttcgattcagctggcaaagtcgccacaatctcatcaacccgctcatcaaatagaacaagtatgaatgagataccttcgattgtgtgtgataccaattgaacgagagagtgtaatgcgcggtgctcggcttgcagcgccacttcttcttgcttgctgtttacccgggcaagagcgtcggggccgttgaggccatcaataaaggtcttgttcaccttgaagaactctgccagtgaggagagatcatgctggacagtctgcagtttgctggaactcacagacgcggaaacggattgtgcgccattaggtccattgcccactttggcaatcctctccttccagatagatcgcaacagacgcgcaatgtatagtgcaatacccgtgtgtcgaggagagggttgcacggcatcaagagcagacattgagccatccgcaatagcattttcattcagatgggcccgaccaccttgagtaatgaaggcctggcgtgctgccgccaggatgtccggatcggtaattcgagtcagtctttggtcaggggaaatctccataccctggccacaagccaccgccagggcagttgccagcatctcgctccgtccatatgttctcaggaaagtttggatatcgccggtcagtccctcatggggattgccgccggtgcggagcaaggccgcgaagatatccacgagacgacgccgacgaatgatgtgaactccaccattagtcaagattgcaatctcggcagctgggtggtcgaattgaacggcaagctcgttggtcactggtgaaggtgccgaaaccagaccaatatcctctgccttgcctcccaggtctagaatgatagccgactcagcggctttaccactgaccgagccttcctggtactgagcgatacgaccagagtcaggggttgagatgaaaagagtatcaatcttttgctgtggatccttggtagtaaaacagaagaaatagccgggggaatatcgctcggcgagacgagtgggtgaaagtgtggtaatctgaccagcagaaggtaaaaccgcgccaagaggcgaaacgagtgagatggaagatgccaccccgctcacgccgggggagagatcgacgggaggtgtcttgacatgcagtgcctgcatgcttgtcggagggctggtgttggtcgacgcaggcgcccaactgtttgagccagtggcgctgagataaatgcgatatcctgttgctgtcgttgcaactagatgataccgcgacgcttctgtggctggcaccggactgatcgaaacaatcttgattctggggttcagggtttcgttggaggtgatgatgtgccctatgttagagtagatatccagagcgcgtttggtgattgcgagtgtcaaagcgccctcgggtcccatgtggaatactcgaattgtagatgcagaggagagtgtgtagagcagcttccgagtgtcatcgagtgccatctgcactacatgctcggaagcgctttgtgcaaggtttgtcaggctcattgaaggcctgaaagccgatagacgcgagctggtatggttgactctgccacagcggccctggaaccacctttcctcttgttggtaagtgacctcgtgcacatcggtgtcagacgatcctccaaagaaaatgcgtccagtggatgctgacgccgcgaaaacatttatatccaagccgcggactgccaccgacattcccgtgtgatacagagaaacctgtcgacctccgctgggcgtattctcatagcccattcccagcagaatgatctccgcagttgtcgcaatgaccagcaaatgggtgatcgcaggcaagaaaactcccgggcgcggtttggtcaacttaacagcattaatgctgttaggctgttcctcgaatcccaccaattgcgggttagagtgtgtgaaatcccaaatgtataatgcattgtcaatcgcgacccacgcgtgatttaactcggcaaacagacccatactggtcgaaacttgtgcgcggttgtattgatcgaaaatctggtcggggatatcgtacattttgactttttggaatggtgcccatgattgggatacggggatgttgtactcagacgaggagccctctgtttttttttgtcagtcttgcttcaagcagtcttcaatggggatatttacgagataaatagctgtcaaggtctggataacgcgattcgctttgcaagctgctattaatcgttcgcgccccgcgttcctcggtgctcaatgtttgatttttggacttcgaagctgctggagggagctttggcatgggcgtttggggttgcgtctgcaatggtgacctagtcggtaaaggccgtgctgtgactggtgccggggtctgaaagtaagctccaggaaggggtttctgcggcgtcgctggagggagatttgttggaagagtcggatacgacatggcgacggttttaaggagggagaaagggacgatcccccgctagaaaacacaagaagctgcagtgtaggtcggacgagaaaaagaaagcaaaagatatgtgggggaatgacgatgagagaaggtcttgggaggagattggattattcaaggtctttgcgaaaagagagagtcaacacctgggagcgcacagaccaattgggatcttccgccttcacggtattgattgtcgattgtttcccattcccaattgatccctcaattgaacttgtttcctattgtcttattgtctaacgttttcaatcaaaatgttccaatccatccgtttttcttcgcgcctaccagctcgtctggtccggtggaattccaccggtccggtcctgccacccttgatggctactttgcggactgatctgaaaactgccatgagagccaaagatacgacaaggtagaggtccttttcacttctgttttcgaggttcagtaagcttataattagactgaatgtactccgcgctttgatctccgagaccaacaacgccgccaaaacctcctcgccgattcagacagacattcagctcttgtcgctaatccggaaacgcatgaatgcctccaaagatgcggcaaaggagtttgatgccgctgaacgtccagatctgaaggagaaagaggatgcacaggttttggtattggaagaatacgctagtcaggttcagaccctccccatcgccgatatcaaggtagtggtcatcgaccagatcgctgctatggtcaatgccaatacgaagcccaatccaggcaccgttctcaaagctctgtttgctgcgggaggccctctggatggcaagccagtagaccggaaagaagttgctactgaggtgaagaacgcgctctcttgagcttacatttaccagattgtatattagtgtcacaatagcctcagtcaagggcattaaaatctcattcataatacaaagaactcctctccaacgccagcctgaaatccttatgaacagaagaaagctactcctccaagagaagtcatcagaacacccaaccaccaccatcggtctggattgatcagctgttctctagcgatcagctgaaatcctgcctttgacgagagttctcgcttttgcttttgcttatgcccggttggtatgggattcaatgtcgtggtagggagcatctttggtggctggtaggcgaggaacatgggatggacaagtgagccgtccatcctggtcaaatcgaggcgtttaatgcgattgaacttgtcgatgtccacggagaattcctgtcttatgtcagataagccgtctaagagaacacgaaagaaatgtacctgaaactcctcggtgatgttatatcgtgtgtactggcctgcctgcttccggcagggattggacagtagctgacgaccatcgacagcaattggtgtcaatatcagcgttccgttgccgaacacagtataagcaccatgttgccattgcatgactccccccgggcatgatgggtcagccgctgttcgatattaatacagcgtccaaagtctagatccatggagaactgacggtttgagattgcgcgatagtatgcggattcgtaatttccttcatcatcgaatgagtatgaaatgcctgttagattcggctcgatcagtttgtcgttgagtggatcgtagaatccctatgcgcgttagtctcgagtcattcatatagtgtacatagttccacatactggaccagtaagaacatcacgagatttggtagtccacgttccaaacaaatcacctgcactcgccaaagcggctgtgactagaagactccaaatcaaaaacatcttagttgacagagggaaaatcgacagaaagggagtatttgaagggcgccctttattggggtggagatcaacaacatagttcagcaaggccctggaatgggaagggtttgatgatcgaagatgtacaaggatcatttgtctctattaacaatcataaaacatacaatggctctatagtgtagtacatatagttatcactgtagttttgagatgattccatcctattggaagtacccgcttgacgctttttccggtttatttttgtaatttacttcctcgtttacccgtggacttgataatccgtcgacaactatcccaccagaatggcttttcaggttgcaaagcgcgaccttcgcaagaggatgcgctcaatcctgcagggtttgtctataagcacaatcattcaacaatgtcaggtcgaatggtggtccttgggttgtccataactaactttgtcccagcaagcgcagcaacaaccaatttcttgtcattgcccgagtaccaaagcgctaaaagcatcgccgtatacctgtctatgccaagcggggaactctcaacaaatgggatcgtaaaggatgctctacagcaagggaagaacgtctatatcccgtatattcatacccaggataaaaaatccatcatggacatgttcgcgctgaaatccatgtccgagttcgagtcattacagctggacaaatggggaatcccatctctcttgtctacgcagattgaaggtcgaccgaacggattgacacaaggcttggatcttattgtcatgccgggcatggcctttgaccacgggttccgacgacttggtcatggcaaagggtattatgatcattttttaacgcgatatgcaacaacgacccgcagtatgccattcctcggtaagtaaatcccagaaaaaaatccgtttatcccgactgaactccattgtagttgcccttgctcttcaagaccagttgctcgccgaggatattcctgtggtggagcatgattggttggtagatgcgatcgtggttggtgatggtcaattcttagaccgcagggtgtagcgcaaatcgaaacagaaaaggaaaggcgaaaattcaaacagcctggatcagagagacattgtctcccttgagaaggacttggcctgttgcgcattagctgtgttcacatagactttcaatttcatcgtacctagaggccggcgcttctcttcctctgtcttggtagccagacgcacttcaacggcatcgtcaataaccaggttcatgaattcatcaaagccctagcacaggttagctcaaataacaagcaaaacggtatcctgtaaagaaacacatacgcggatcttcccctcaatgcggaaagcgagttgctcatacagccagactgagacggtgctgcgtttctgcaggagactgaaaatgaaatggatcggagccaacaatgtcttgcggcctgccatgatgtgcggttatgtcgagagtgatagctgtcacgcgggagacgaggcgaagaaagctctggcgggcctggcaggcgtcccgtgatttgattacggtaatacggttatctggtcacggccaccccatcccaccatcaacttgctccccctcctcgaacgcgtttccgcactcagatgctgatactttcttaatatattgctgagccttgattaatctatttagttcaacatggccagcaaggaagccgggcaggcattcgccccggtcctggcggccgtcgcgacaatgcaaggaaatgtgtctaggactgagaagactcaggcccatgaattccttgagaaattccagaaatcggtacgattctttcgccgagacctaagtggtatcttttgttaatttcaatgcgtttttagattgaggcctggacaaccacacatgctctattacagtcccccgatgtgcctgtcgaggctaagctgttcgccgcaactacactgaaaggaaaagtaagggtattcctacctgaggagtttcgccgtttctaattgcgcagattattttcgatctcgatcaactccctccggactcagtattggccctgcgagactcggttctaaacctattggttgcatttgcgccgggcccgcgccctattcagacccagctatgtgtgtgcttggccagtctggcgattcagatggtcacatggcaggatgtgttggcgactgtcggagcagctctaggaaacaccgcaggggattgtgtgctggaattcctgaagatcttgcctgaggaagtcaccgagggtcgcaaaatcaatctcagtgtatgttcctctaatgcgtttacaaaagttcaagctgacatctacaaaaggaagacgagttgctcgcaagaaccaaggagctgctagaagacaacgcggagcaggtcatgcagctgatgatccaatacgctcagtcgtcgcgtacgtattcgacggccacgtcccattctcctgccgaattaaattccataactgaccatgaacagctgccgccgcaaccaacccccgtcttctcgactgcattacctcgtggctacgtgaaatcccggctgccaggatcgttgagtcacctctcatggacgtcatcttcaaagcgctggacaacgacgcatctttcgacgccggtgtggactgcgtttgcacgctttaccgcgacacaaaggacgtggacgagtcattgcccatcattcaagccctttatccacgattgatggcacttcgtcctaaagttgctgaaactgcggaggccgaagatttggaggctttcaagggtatcacaagaatgtttgcggaggcaggtgaagcatgggttgttcttgttgcacgtctgccgagtgacttccagggactcgttgagacgcttctcgaatgttgcgcacgggactgggagcgcgacgcagtgtctctaactttcattttctggtacgagctgaagcaatatattgctctcgacctgtacactgacgctcgagtcactttccaacccgtctttgcccgattggtggacatcatggtgaaaaacctcgagtttcccaccccggaagacggcgaaaccgaggacctgttctccggagaccgcgagcaggaggaaaaattccgtcagttccgccatgcaatgggcgatgtcctcaaggactgctgtgccgttgtgggtgtgaatgattgtcttgctaaaatctaccaactgatccagcaatgggttgccaagtatgcatcgcaatcaagcgacgaacatgttcctcattggcaggaattggaggcccctctgttcggtctccgcgcaatgggccgcatggtcgacccccaagagagcaccattcttgggcagttgattcctctgattgttcaaatccccaatcaggagaaagtgcggttccaggcgatcatggcgctggcacgctacactgaatggacagctgcccatcccgatacattggaggcccagctcaactatgtgatttccggtttccatcattcctctcaggaagttgtacaggcctctgctcttgccttcaagtttttgggaactgactgccagaagttgctcggtggtcatatcgcgcagcttcatgccttctacgagtcggttcttgacaagctgaagcccactagccaggaggaagtcactgagggtgttgccgcagtggtttcggtgcagccccaagagaagatctacgattcatacaagatgttctgcgacccaatcatggcccgaatcatgaaccttgccaataatgcgcagactgaagaaggacagcgagccgtcgcggatcatctacagctgatcactatctttgtgcaggtggtgactccgattcttgcaccgggagaagaaaaccctgcggtcaaatactgcggtgagattctacccatcatgaccacgattgtgatgaactttacgtcttctacgcctattctcgaacgtgtgtgccgatgctggagatacatgatcatctcttatcgcactgacatgatccctcttttgccgactctggcccagagtatcgcgaacggattccaggcctcgcgcgagggttgcttcctttgggctaccgatgcggtggtgcgcgaattctccgatggtgccgagtacgtcgaccaggctaccagcgatgccgttttccagttctatgagcagcaggcggttgctttcctgcgaatcttgaacgatctccccccacaaaatctgccagatgtgattgaagacttcttccgtctctcctctaacgccgttcgatactatcccaagaagtatatcacttcgtcccttgccgtccctatcttctccgctgcactcagtgctctcactcttcaacaactcgaccctctcatcgctacgctgcattattatcgggatctgttcagctttgcatttgataagcctatggtctcccagttcaccagcccggaaggtcagccttacgttaacccgcctgaggttcgcgaggctgtcaaggcgttgattatctcgcaaggccagcctttggctcagcgagtcttgacgggcatgatgttcacattcccgggtgactgcttcgctgatgcgtcgggagtactgatgacgatgttcgaactgctccctcaggaaaccggggcatggctgcagaccactttgcagatgctgccgagtggcactatgaagcacggcgaagccgagcgacttttgaacagtgtctctgacaaagtccagtcaggagagacccgcaaaatccgtgttctcctccaaggttggtcccctccccttccctccccttgttctttgttctctaatctaacctcatctagacttcaccaactcttaccgtcgccgcaatgtagccccacgcgagggccttggccgtctggaggccgcccgattccgattcagcggatgagaatgccactgtaaattcttattgagtgctgatctgcactaaaaaagagaaccctatggaagcatttgcacaaatcaggcgtcagttccttgctattgacgtgccacgtagtacgatacacgatgggatggcatgaactcggtgtgatgattaatgacctgctggtacatcggcctgaccagaaccttttctggctttgacattgccatatgttgtaccagctcgacctgtatctaggtattcaatagtcgcgactcatttctgcattgagatgcgttggcgcactttctgtgtgtgggcatttgatcatgatcatgagttatgaatctattgagcatcaatattcgattggcataatccgtatatatatcttaggcgtagagtagaagggatctacatgtatattcattctacatatcactactagtagtatatatttagagaagaatagactatattccttgcaatgctatatatacacaacctacaacacatacactccgactatctctcaccaataaagtcatatccacaccaccccaccgatatctccgcacttcccccggacaacccgtttgaactcccacttgcgcttcattctgtgactcatttctgctccctaaccattggtccttcctttggtgctcagacattcttttttgactccaccttccagtgatcatcgtgtcatggcatgaaatatggagaacgacggtcaaccctccaagagacggcgacgcagtcgcaaagttctctccgatcgtaagttcgaatgcacatttgaaggctgtgggaagagttattctcgcgccgaacacctgagtcgccatgctctcaatcatgccccgaaacaaatctatcgctgcgactttcccaactgttaccgatccttcgtgcgacaggacctctgcacgcgccatcgtgaacgtcacaccaccagcggttcccagctccagaaacgtgatagtttcgccgaaaatggcaccaaaacctcctcgccttcttcgcctgctatcaccgcgcccgaatacttcgttggctcggaggatcccaaacctccggtgacaacataccccctcaccaccggagtggatagcaatgagataccagtggaccaatattcggattttcaggcggtactgccccatactgaggatcttatcgaccttgactccatatcctacccgattttcggcggggaaacctataaccgatcaccattcgccatggcagacgattttgcggcatggctattcagcgagccactcgcgccgttgggctacgggatggtaccacttgctcagaatcagttctacatcaacgaggctgtatataacgacgacaacttttgctcagtgattccacaacatcccatgagcgtgacgagtattctggactcgggagcaccgccggctctcatatcagaaggaaagcgtcaggagttgctgcacttgatgtcaacacgattcaatgaatcggcgtatgcgtcaggcactaaacgcaaagatgcgctgatggacggggatttgaataacgaccgacatgccttgagcttacgcatgatgcagacgtacattggatcgtattggtttcacttccatgcacaactcccaatattgcaccagccgacattcagtgccgatcgtaccccgaacctattactactagcgatcatggcaattggcgcggcgacattggataagattcatggccagtctgctattgaagcagcggctgaattggcttgcttcattgcctggcatttgcgttgggaaatcttcatggatgcggactttcggccgccggcgaagctttgggtgttccagtccctgttactactggaagtttacgagaagctcttctctacacgcgcattacacgaacgcgcacatattcaccacgacacgacactcacgcttatgcgccgaggcagttcgctcatcggtagttcttcatttgctaccccagaaaccaaagaagaagacgagtcatggtcagcctggatcaaggccgaagcgactcggcgggtggcattcgccgcctttttgttagattcaacgcatgccataatgttcggtcactcggccaaaatggtggcccacgaactacggctgccattgccctgtgacgaggcgctgtgggctgcgacaagcgccgccgaggtcgctcgtgtacaatccagtctgcagtcgcacggtgtgcgaccaattatgttcctcgacggcctcaagcgcacactcaatggccagcccgtccggaccaactcgtttggacgaattattatcatgtcgggcttgctgagtgtctgctggcatctaaaccagcgagacctgcagattagctcgctcggtgtgggccagactctcggcggacgagataaatggcgctcagcactccttcgggcattcgataactggcgccgcgacttcgacgaagccctgggaccgtcgaccacatcggagtcgcgcaacgtgctgcacgggctggcccatatgggctcccatgtcgatatagccgatctgcagatcttcgcaggtgctggccggttgatgggccggtctatcacagcgcgtgactactttgctgcacgggaaaagaccgagaaatgggcgagaaaggcttcagcgcgggatgccacgttcttcgcgctcaaatacctatctgcctgtttcttagacccggctacacaccctggggagtatgctgcgcgcgatgactacgtgttaaaccggccgtgggtcatgtatttcgcagctctggtggtgtggacctacgggtttgcactggacggccccttgcgtccttcccctaccctcctgacgttagcggaccgagagcgcgacatgcaggaatttctgcatcgcgtgggagaaatccaggaacccaacgaattagaggccatgaccgggcgcaatgggtgtctcggcctgctaatgattctccgagactcctttgccaaaccgcgatgggagttactgggagaagcggcgcggctgctggacagctgcatcgcaaagctgcagtcgtagcatgtatgaatgtgtttatataccaagagatgacgtttctattattccatgatctggccagcaatagaagtatacaaccccctaaatacgcccccctgtagcggttgccctaacaaccaccgccgatcccacacctagttccccccctcgaccttcacctcccaatccgcatttttgtttccaatctccaatctccaatttcgcaaactatccaaccaaaatggtaagttcccaaattcctcactgttgatagacttcctattcaagcggtccaaccgcaaccccttcccgcccatgtaaccgctcgccccccggatttcctccccctcatcaacaactgtgtcaacaaggcattgccagctctctcttccatcttcatcatggctaataaaatcgatcaggcatccacaaactacaaggaagcgttctcgctgttcgatcgccgtggcactggccgtgtcgctggtgacctcctcggtgacctgctccgcgcttgcgggcagaatcctacgctggctgagattagcgacttggagaagtccgttggcggcgactgtatgtttttattctttgatttatgtattagttggacgcgatcgcgtctgactatgaaaaaggaattcctggctaactctctcgttcgctgcagttgatttcgactcgttcctgaaagtcctcaaccgccctggcggtttccgtgagcccggcgagccggaggagtactgtcgtggattccaggtctttgataaggatatgaccgggtttattggtgtcggacagttgcgatacagtatgttttctgtttttgtcccaggcaattcggtttggttggtcgaaaggatattgctgacattccacgcttgcagttctcacaaatcttggcgagaagatgtctgacgatgaagtcgatgagctgctcaaggctgttgacactagctcgggcgagattaactacacgggtatgtttcgctgcgcctagagtgggctatgtgctatattgcatctgctaactctctccagatcttgttcgtactatcctcgccaactaataccccgatatgattaacgttcgatatggaaatggctttgccttggtggattgaaattcggcgcgttggaaccttcgtcttgtatgtttttattatcaaatacactgtattatgctgctccggggtatcgccttccgtagcgcgtagcgcatagatatagatatagatctaatctacatctgcatctgctagattgatcgcacctctataaactccactcccatctaaacaacccactccctccactccctctccccaaccccctcaccccccaacttctccgtctccaccacagccccaggaagaagataaacagccggcggccgctcctcctccccctcctcctccccatcccgcgcccctcccctctccctctctcgatccccagtagacgcccaatgcaaccgatccaaataataccccacaacaaccttgcaccgcccacacctcaacagaatcctcttctcgatcccgtcttcgcgccggataatcgtcgcccgccggtccgggatcgtagtagccagcagaagcgtcgtgtggttagagacatgccttgctcttgtcttgcgcgatgacggttctgtttctgtggtcctggcttcttcttcgaggtcggcttctatatccgcatctgcgtctgcgtctgttgagctcttgcgctcgaggggcagaatcagcgctttgtcttttccttcgccgccgcgccgcggtagggtgcttatgttgcgggttgttgctagcaggaggtggttgcagaagcggcaatgttgggtttggattgggagacggtggtcggtcatttttggaattggttattgactcgcgcttttgaactgataggagtcgggaatttggagctgctgcgcggaggcagattgatctcttatgttggtgatgcagagctggggtcttggttagtcttttgcgcggggttcatgaggaaatatctttctgctggcttagtaggtacttaccggtgattggatacacttgtttaatccgagactctgtgttgtcttgtatgctgaagttctaaaatgagacgatctagaaaaagagctgttgagttgcggagaattgcagaatggcaaggcggtgcgcttatcggtatctacagctaaccttggaacttgttagctacgatatagacagttcaagtagaggagttattggcatgctgctcgttattcatgagcacaagatacgcattcggatagctctatataatttaataggtatagtttatagccgttcataagccccgatggctgtaaatgctacgcaccactttacgccagtcccaaatccttgtagaatgcatcggtccgaggcgcacggcctaagaactcggtcagagtcttcatctcatcctggctaccacccttctctagaacctggtagcggtagcgacggccagcagccttgttcatgggatcgtccttgaagacggtgtagaacatgtcggtggagtaaacttgggagctgcagagcgaaatcatcagtattcgaacattgaaaccaatcacacaaacttataacttacctcaggtatccgtagtatccagcgtcgtaacctccgatcaaatgtccaaaggtcgcctcgccgtggccccactcgtcgccagcgccctgtacttccggtccgtccatctgggtaatctcatggcggagacggttgtatgtcgcagacagaggaagagcctcaatgtcggcgtgggtcttgggctcgtggacggtcatgtcaaagatgccgaagtgcagctggcgcaggttgaatagggagtcgttgacgtgcttggtgcgaatcaggttggcaatgacatcgtccgggatgcgctctgacggctggctggtggcagcttcgccctgagcctccttccagctagcaaggtactctggggagagggtggagtagtgtcggctcagagagcgcagctgcgagggttcccagcaccagttctccagcatctggctgggtgcctcgacaaagtcgcgcactgtgctggtaccgtggaagcgggagtagatggttcgggacaccaggtcgtggatgccgtggccgagttcgtggaagagggtcacgacctcgtcgtgcttcagcagactaggcttcttgggctggggcttggtgaagttgcacaccaatgcggtggcagggaatcggcgggtaccatccttattaatgaagcccggctgcaggttgaagttggctgcatggccatatttgccctcgcgagggaacaggtccaggtacaggtatccaacgaacccactgcccgcgtcctcatcgttccacacactgaatacttggacatcctcgtgccagacaatgtcattgccctggccagtgggggcaatggctgcccggtcctcaccaatgatctcaacaaactccagaccgaacagctcttcgaaaatcttcagcataccttgaatggttgtctgcaaggggaaccactcagcaataagctggtggtctagcgagtagtccttttctagcatgagacggtcatagaatcggtggtcccacaggtagtagcggccatcagcattggggtccgtggcgttcttcaaatccagcaacttctgtatctccttcttcccgccagcggtcagtctgtcccgaagatcacccaaaaacttgttaacggtctctggggtcttggccatcttgtcctcgatacgaaaggcagcgtggttgggatagccgatcagacgagccgcctcatcacggagtataatggattcccggaatagcggcacattctggttgcacttgttctcattggcgatcatgacttgccggcgagtctcggggtcgctggcatatttcatggtggggaagaggtcggggtacttgaacgacagccagagcttgccggcgttctcgtcctcgcccttcttcaggccgtccagaaggtccttgggcacaccagccagctgctccggggtaaaccaaatgccgccgttctcctcgttcaggttcttctggaattcaatgctcagctggctcagcctcttcttgatctccttgaagcggagccgatgagggccatcgggcaggccgagtccattacggatgaagtccttgtgttccttctccaatagacggcgtgactccggatcgagaatctcgttgcggcgcagtacggcatcgaccaaattgaagacatcctcacgcatgaccgcctcaataaagaactcatccatcagctcttcggccttggaagaagcatctcgcagcttcgagtctgttgatacagcctggtagaagcccaggatgtgtgactctagtcccatctggttgtcatcttgggcgagaggaaggacaaccttggcaaaggttgcggcctcgggcttgacctccgccaccaccttgtcctgaatggctcgcgagctcttgatcaagcgctcggcatcagctagaagtgactgcggggttgcggtaaagacaggcggggcctggggtggcttccggaggtgagcgggggccatgctggaggtcgtcaagagtcgtattggtacgttggtacgtaagtggcccagcgcgtatgagaagcgggcggggagacggaggaagggcgccacgatgaggatggcgaggatgacgatgaggagatgaaaacgagcggtgaaagcaatgatgggcgggtttgaatgcggtgggggaaggacacttggagatatgcagctgtcaggtgatctgaagctggtgattgcggggacagatatctacacttcttggcatttgtttctgcacgtccttgaattactctatatactaccaatagtttagttattgcatatggggtaaaacagtttatttgcaaagctaaataactagttaactaggtgatgtcataacttactaatgtataggttatttctaaccttggagctagaataagtagaaagttaaggaaaccacgtattctgccatgttacttctaaagtggaggatggggcttttgccaggtgtcaagacaatgtcgactaccccgtagatcagatatcccaacataataataataggcgtccggagtatcccgtacgcagaagtgacatgtgaaaagcaccgccccgcacttcgctcgctccaacctacagctcccctcagtttacaacataataaatatttcaagtcaaaatgatccaaatgaatatgttcatataggaatgaaaattcgtttctaattcatgattatctatgaagtgcgtcacaggtcgcttttgatgaacgaagaaagaaatggaaagaaaacgccaactccgaccaacccacaaatgcaaaaaaaattgtcatcaagttcagtttaagctgcatcggcagtggggattggctcaggcatcttagtgacctgttggccggcccggatgatccgctggcctgtctcgtcgcgcacatattcggagttctccttctgagcgcgcttccaaatctcaacctcaccgccgccacggatgactccgacacgcatggtggaaagcaagttgtgagcaccgttggagtggtagtaaacaccaccgttgaacatggctgtggcgtccttgccaaggccggacttgatcatcgccttgccaccggggtggtccttgatgaaatcggttacgtcgtgaacaactccggcaatagagatgaggccacggccgttcttggtctgctcgacatagtcctcccattccatgacgggaagctggtccaggggagtaccccagtcgagcttggcgcgcttctggtcgatcttcttctgcaactgctggacgcggcccttctcgatttcgttggagcggaactgcttcaagtcgtaggccaggccgagctgcttgcagatccaaatggtccacttggtggggtcgtactggtgccattcgatggcgttacggtagtcggaggggaactcgtggtggaagttgtggtagccctcgccgagggtgaccagggcggtgataatgtgatcacggggggagttgcggtcgtcgaagggctggtcgccgagccagtgggccagggagttgacgcagaaggtagcctgttgcacgaagaagatacgcagaataccggcgtacacgaatccgccataccagtcaccccagccgagaccagcgaccagcatggggacgatgagacccatggtgagcacgaccttgatgtagttgcggtgttgccagacaacgacggggtcttcgttcagatcggtgatatcagtgcggccaattcgcttggggttctgcttcatgaccatccatcccaggtgcgagtacagcaaacccttacgcacggagtaagggtccttgtcggtgtcggtgtaacggtggtgagcacggtggtcccgagcccaccaacggatggaaccttcgacggcaccgccgccgaccagagcgagccagatacgcaggggcaaggtggcggaataggagcagtgagcccagagacgatggtatcctgagaacggagtcagctcgagtcaaaggagtatacttctaattctgaactacttaccagctgtgattcccagtccagtgaagaagtaatagatgacagcccaaatagcagtcttcagctgcagaggcacgaagaacgcctggatgcagcccgtgaggggaacgccgatgatgaaagtaacgttgagccagttgacgtgcttgtaccagttctggcgagtcatctgggtatcagcaatgtgcaccttcttggtgtcagccgcccgagggcgtgaagcatccagcttggacgacatggttgatgtgtagaaggttggatttcaatccaggaggaccaaagggttttttatactagggcccacttgggaccaacgttggggagcctgggtcttgatcgccaacgtatgtgggaggaatagggctgaaagacgaatcaaatgaaagcaaatgtccagcgtcacgagatcccgaggcgaaaaggaacccgaaacagaaaagaattgccttgaaagcctacgctgggagacttttgcgcaaccctttgctcggatgtggcgtgcctcatcgctttctggcgaatgttgggtccagccagccccaacgctttggtgcctcaggcagtcatggccaatcagcgcgcgacggcaaatatgtttatgtcagcgctactcccagcagagtgggagccacgggtgaaggttaagtccaccaacggttatatttaacctcgggatttctaggaattatgctgctttcatccaatgacgtttcaccaagaggtaacattaataagacgccgcatggagctacatttctagttaacctacggttttcccccggtcgcctccttccctcaggcagagaattggcaatcgtcatacaataagtcatcgcacgttagagaatgtgtgagaatcgcgatgcgtacttgggcgaatcttattgaatgatcgaattctggtcatgtcttggccacccatcttctcgatgccgatcagatcaagttccgacgacgcgtatgcaggatgtgacagggaaatatataccacggtgaaaatcgaatgtagtgtgcaatcacaagctaaacaaaaatgcggatatagcgtgaaatcataagctaaacgaaaatgatgtcgtgttggtgtagaattggtatatcgtcatggacacccgttgagttaaacattgttgaaagagaagaagagtcgatgaaaccagccagtggcccgtggggatatacttttctggaacacgcgggatatccgagcctcctgccaaagtatacatactgggtaggtacctcgatgtactccggaggtatgaggtgcatgtatgaccacaggaacaaatcgagataatcacaacatctgatctcatatgatacatatcaccacatagtttcgaatatccctcggtatctcataacagtctgataagaacgaccaggaagccgacgtgaggtctgactcctaaggtcggagccttccacctcgtatactatggacggcaccctccgactgccagatcttagataaacgaagatagcagagaacgtttgatgatatccgggttgtggagagtaaggcctcgtgtcaggatacgtgtatcccgtacctggcaaactgccaatgtccctcctgaccaatgagatcccctcaactggccccattctccatctaaatacacagccgtgaccatcccgaaacacataatatgggggaactcgggccctttgggctaaccagaacaaccatgggccttcctgtatccttatctttccccactcggccctgattggctggcctcccaagataaagcaggggccctaacgcgatccagacaagcggccaccaggttatgcgatgctcttgctaattgtcccccaagtgcagtctctaattgcctggctgccggtgcgataacagaacctgtcaggttatcccttccactttggtggacggtggatcccatgtgttcttagtcagcgccccgaattttgaattttagagttaccgaagctcggggtgtataatttttttttttttggaaatttaaatataaaacctctgtcccggtgggatagttcaatatctacattcattatatcgaacattcactatggacggtccagatcaaatcggccccgatcattcgcccaagcgcacaatcagcgacagactgcgctacacggtcaagaccttcactactcggtatggcttcaaatgatgtgttctggaggggccttgactcacaatcaacagagagggcctactaggagagtacgactatggatacctcttcatcccacgactgccttttacaaagcgagctcgcaaatctgccccgttcttcggtctcgaagatcgcgtgccagtcgttctggcattgattctggggttgcagcatgcgcttgctatgctggctggtggtgagtcccagagacacctacaatatacaagcaaagactaagagcatcagttatttcaccacccattctactcggcggctcagccggtgccaacttcggggatgaactctaccagtacctcgtttcgacttcgttgatcgtctcgggtctgttgagtgctgttcagatgttccggttccatatcaaggggacaaaatactatattggaaccggattgctatcagtcgtcggtaagagcttctcaattcttcagatcctcgcttctgatactaattgttcaaacaggtacatctttctctacaatcacagtcgctcaaggcgccttcgcccagatgtataaatcgggatactgtccttcatctccagatggatctccgctcccctgtccaaaaggttatggcgccctcctcggcacctcgtgtctctgctctctcctcgaaatcggcatgtccttcatgagcagcaagatcctcgcccgcgtcttccccccactcgtcaccggcccaactgtcctcctgatcggtgcctcgcttatcaagtccgccatgacggactgggccggtggcgcatcatgtggttcggacccctccgcccgcgcattgtgtcccagcgctagtgccccgcaccctctcccctggggaagccctcagttcatcggacttggattcctagtcttcgtgacgatcatcgtctgcgagcggtggggtcctcccattctcaagagttgctccgtcattgttggcctgttggttggctcgatcgtcgctgccgcatgcaactacttcgagtccgccggtatcgctgctgcaccagtggcttccttcgcttgggtccacacgttcccgctgtcggtgtacccgccgctcatcctgccgttactcgcgctatacatcgttatcatgatggagtctattggtgatatcacggcgacgtgcgatgtctcccgactgcaggtcgagggcgagaccttcgattcccggatccaaggtggtgtcctgggcaatggtatcacctgtctcttggccggtctgatgacgattagccctatgtctgtcttcgcgcagaacaacggtgtgatcgcgctgacgaaatgcgccaaccgcaccgccggctactgctgctgtctcttcctggttatcatgggaattttctccaagttcgccgctgcgctggttgcaatccccagtcccgtgctcggtggcatgaccgctttcctcttcagttccgtggcagtcagtggtctgcgcatcattggatctgtcgaacccacccgtcgcaatcgcttcatcctcacggctagtttctccattggaatgggtgtcaccctcctgccggcatggttcacttacttcttcacctactccggtgacaatcatgcgctcgctggtctgatcaatgctgtcgatctggtcatggagaacggattcgctatctctgcgcttctcggcatcttcctcaacctcttcattcccgaggagcctgatgatgtccccgccatcttggagtcgaccgactccaatgagacccaggtacagaccaacatgcctgaacagtcgtcgacgactaccaaaatggcttgatcttgcgagccttgtatagttcagtcatataatgagtttgtggggccatcattgccctttttagcgttatttaatacctacaatgcaactttacgttgatatcccctgatattttcctaccctctccagtatctaccaataaaccctcaacctaaaaatcccaatatcaagacgaaacccgcgacttaaaaaccggcctcggctgcaaattagcactagccgtcaaactattctcattcccaaacccaaaacactccctctccaactccccgatatcgcagcgcacaaacccttcatcaacaagcacgcgcagcacagtaagtatccacactcgacacgtaatccccggaattgcattaagacacccatcataactcctcataatctcatcgacacgcgcatgcgtctccggcggaattctcgcgatctgaataaccacgcacaggaaattctcggcgaatatcgacgccgtcgcctcgtgcccgggaatccatccggcgccgatgccgcgcgcgtggtactttgttccgcctggtgtggtggctgtgcctttgtgcaggtagaaggcccagtggaagtcgttggggaggggtgggtcggagcgaatgtagaggattatgtggagggtgtttggggggagacccgctaggctttcggcttgtttttttttggtttcggtgggggtttgttttgtttcggggtgtgtttggtcgggcattttggagtggtatagatggattaggaattaggaattaatcaaatggaatggaatgagtaatttgaggatggtgaaatgggatggaggggatggctgccaaggattgagaatacagctggatggagggctgttgggctgattataactactactgataatggggggaaaggtagaagcgctgagtctgaagccctataactgtataggctgactcgtgacacagatgatgagagtctagagaagagagagagcctctagctacccgaactaggaccttcactgccagtaataagccttcgggccgtctttagtggaatagaatgtttgcgttcgagctgcaatgaagggacgctgggagtggtacaacgctggcaagtattaggattatataaactatactactattatggaatttttttacaccccctcgaccttctccccgggggccaacatcttaatataccggtgcaccccggtctcaagaacctcaacagaatccccaaccctaaccacaaactcctccttcgcaggaacaagctgcatccctaaacacgcattggtccgatcgccatcatcaatccgccgatacgactttagcgtccgatccggctcagcattatgtctatccccggacagcggatcgacattaggcagtcgacaccggacagtccgacaagaagcgtggatctcggtaccgccaatagcaagccgcttccagtgatcttcctcaaaagcagacgggccttgaatgatgatgttcgcgcggaaacggcgaatgctcaatcgcgggattgcgtaggcacagcgtgctgctacatcccggtgactggagatgctgagcaggtggattggatacgcgtctgcgaaggctgtgcttggctggaagcctaggtcttctttgcgcggtgcgttacggaagatctgccgtgaatggggtgcactggcgcggaagagtgtcagggtcttttttgatgggtcggaccctagatatgcgtgtaatgatgctgggagcagtctgccgtagtcatgggctaggggcttgtctttccagatcttgactgggactagtgggaacttggagtccgcggggggaagtagcgggacttggaatgtccgttggcttttgaggaacttgagtgccatgccgagcttgatgggcagacccttccatcctgctggcggaattcggggatacgatatcaacatcacaccctgcgacttgacttctgacaggtctgcgttgtaatctggggcagacgggtcaggaacccagatctccggatggatcaaggctagacaattgaagcttgcatttcgcagggtacgaatggtccattcgtcattgatgtactctgcaaagacgaattgtctatcaaattcaagtccagttggtacgacgtttgagacttgcagctcgactgcgccacaggatttgagcgggtagctgaacaatgcctttacgcgccaggacggacggccgtgatcatcttgattgctaggtagaccctggctgtactttgagtcgaactcatcgtctaggttgctttggcctggcggaagtcctaggcggcgacatcccttgggattgattggcgctgtcagtgttttcaatgtcttcagagaaagaaaaagcacagatagaaagaatagaataaaccaattggggacgatatcatccccgagggaaatgtcaacattggacatgaggagtatgcaggactcgagatcgaaagggaaaaaagtcccgccctcggatctccgaaccgtcaacattccactgtcctacttatgatggcatctttaatgtcatttttagagattgaatacagcgttggagcttgaatttgtttccatattcttctactaaatcgggattcattggctttgctgccagtcatcctgatgcgcccatgagcatcaacatggaccttctcggtctagacggtctcgaagggttcgaagatacgcgtaagtaattccccaaagccttagaaaagcacaaacattaatccattcccagcgcccgtggtttcgatttcagcgtctcagtccctcaacgcgtcggccgctacccgcgacccgatcgcgacgggcctggcgcgtctggacgaggctctcaatgacctccccgaccagtccaaccaaggcggcatcctgcgtggacatgttacagaaatattcggacccccaggagccgggaagacctcgctggcgtgagtgcacttctacccacaccgccacagtctgatttaatccagtcacaggttgaatattgcatgtaatgcactacgtgacggcaaagtagtctggatcggtatgtgatcctgttagttcccagagtcagctgcgctgccctgctcacaccgtcagatacgggatgtcccttgcccagtctccggctggaggaaatgtccgtcaacctggatgactttgtctatttccgggcgcatacgctggctcatctaatagccctgcttgcacgtccaccaaaggggtttccaccgccggaaacaaaccttattgtcgtcgactctgtgtcgaatttatttccagcttacttctccagcgcccaagagctcaaggaccagcctaccgagggcaaattcagcgataaaacacacctgcaatggctgatcaatcgcaaatggaacattgctagcgagctcgccatgcatttggctagactcgcggcgaaaaatattgccgtgttggctattaatcaagtccgtacggagatcaagggtcaatctcacgcagttctgcagccgctcttgtcgggcagcgcgtgggaggctagcgtacagactcgcattgcggtctatcgtgacctgccggatgagcgatttgcagaagttgagaagcgcgcgggtaagccattgcccgagcaagccgggctgctcgttgcgtttcgcattgaaccggtatgttgtgtcgatctccggcccactgcatgcgattgtgcttataatctgtctaggatggtctttatgaaacagagggaaaggaatctccgccctccgagcctctgacccctttgccaaagccctcttccgactttgagtactatgatcctcctaccccgactccttcgcctatatcctctgtgctgtcttctgcgccgtcctccgcggaattggagtctccaagcccttcaccatctaagctggcgtcgccagaacagcctgtacataccccaattaagaaacggaagctggaggaggtagccgatagtcaggatgaagactccgaggaagagaatgtcccatggacagacgagacaaccctgaacacgaattaaacatgaaatgattaattatttcgcgcaattactcgcttatcagcgccataagatgctatagaaaatagtacgatgtctctcatttctttgttggatatctctttcaatgtctatttttggtatgttcttatagactatatcttttttttccacatgcaaggatgaaaatatccacaaaatagtcaaatctctttgaatcgcaaatgttttttaattaaactaatatcggacttcgcccccaaggccgatgccggacgactattgaatgttgatctatccccttcccttgcccccgttaccccagattttgggtgcgaacttgtaccttaccaagtactctatgggcacccctgaacacccttgcatgcccaaggcttctttttgtttgtttccccttcactcgttcagacaagtccaaaacctgatctcctgcatgacagagcacattgtacgaccagtccatatcccactctgtatccgctctttcgccaattcgcctttttcttccttccttttacaaaaaacttttcaattccctgtttgtccacgagaacatgtggacacagcagacagggtgaaccagactccctcttcgagtccggtcgctcatatacctccccaagccccgaatgagtctcttctagaatcatgtccgacgttcccctggacatgctgaacgggatatccggtgcgctcgcgaaagaaggcgacgtacgacagatgatcctcgtcgccttcatcggactatcatgctacaacgtcgccgagctaattgtcctcgtgccagccacattccgccggtggcgcgggctctatttctgggccctgctcgtctcaggcgtgctcggcgtggtaccatactcggtcggcttcctgatgaagttctttactcacacggactccgtgctgtcggttactgtcctgactatcggctggtggacgatggtgacgggccaatccgtggtgctgtactcacggctgcaccttgtgctacgagacgagcgcgtgctgcgccgtgtattgcagctcatcgtcgcgaatatctttctcctgcacgtgcccacgacgatcctcacttacggcgcgaatatagtgcacagcggcgacgacgcctggatcaacgggtacaatatcatggagaagatccagctgaccgggttcacgatccaagagagtctgctgtcaacgctgtatgtgattgagacggtcaagctgctgcgccttggcgcggatgtgtcctcgcgcccggatgcacggagcatcatgtaccagctgatcgggatcaactgcgcgatcatagcgatggatttggtgcttttgagtcttgaatatgccgatctgtacgccgcgcaaatcaccgtaaagggtttcatttactcgctcaaactcaagcttgagtttgctgtgcttggtcgtctggtggatctcattcaggggtctagacatcctatctccatcgctattgccgatacgttgcctctttgctcgatgcagaggccgcccgagacgcctgatcgcggcgacgatgtgctttacgagcaggctgagccgaaggactttttggctccgccggtcggaggccgagttgttcagaggaggatgtttgtggagtctggaaggacggctttattagcaatatgacggtataaatataacaataatgaaatcgaaccgagctagaactggatattgtgtgtgtagtcctagagcataagccgtataaggagatgattgtgaggaatggaaataaattagaaatcaggggggtggctcggaccatctcctagcgcttcaaagcgtcctggtttgctatcaaggtacggagtaaagagacatgaagtagaccattaggtaggtaactgtctgtaggtggcatgcgatttgtaataggaaccgtcaatcaccaccagacaaaaggaaacgtttcattcgaggctacataaattatatgctctcgttcatagattggtcaggtagtcctcgatctgctccttggtcaacttgcggaaccgtggtccctgagcaccctccactcccttgaagcccagaaggtggtccgctggggggccgacaatgcctggaacgatgttagtcgatattcaccacaccttggctagctaagcagccagaaggaaagcaaaggaaaggcagaaacccaaactcaccaatttctattgtgtcaccattcatctcaccctcgatcgtctccttgagtgtcaacaacgcgatatggatggcatcttccaattctagcccttcagtgtaccgtttctcgaggaacgtcttggcgctcgttgcgtgtttgccgatggctgtcgccttccacgggtagtagctgccactggggtcgacctggtacagactgggcccacccttctgaataccgccagtcttgctggagatcttctcctcggggtcatccttcttagcctcttctgactccggctcaacgccctcgtcccagcctgcgaccagcagactgacaccgtacggtcgcacaccaccggattgcgtagcttcctgcactacccgagcgacgtcttgaaccaatatacgagtaggtgggtattcgttgtagatgcgcttgtagcctgtgtgcgagaccttgcgggccttgtcgaccagcacccggtagtcagggcccatgccggcgtagaccataccgatatccggcgtgatcagtgagatcttggatagcgagggaggatcgatcagaggcgaggatgacttcttctcagtcgcgaggacaatgccgttcgtagctatcacggcggtcagcttggtccatataggtgagcttggacgttttcgtacctttgataccaagggcagttacaccctggttgaccgcgttcaaggcatattctatatagatcagtcatcgatgcttaagctcagagacgatggtccataccaatttgcaccagctttccgctgtaatggagctgagttagcacgctgtcaattaaacaggacaagtcgtccttacctgggggagaatgtcgtcaaggagaatgagtatcggtcagccatgattcgctgttaataggaagagaagaggagaggatggaaagatcaaaagaaggggagctgtgttgtaggcagagatgggtgacgtttggcgcggtagagctcatgaaggcggtgaccagatcgggattagccgtggggtttgggacaccttcggcttttctgcttttcctcttcttctagcctttctttttttttcaacatctcaaaaatgaaacagtagctcggccttctcttgtcaaggttcgggtaaatttcgatgtgagaccaatggaagacacacagcattaccccccgcgggtctgtcgcatctgcctagaaagcgtgctgccgactttcgaaccctcagaattcctccagaagcctcgagtggtttatcaatcttccgatccagaatctggccgtctgctaagcccttgccaatgcaaaggctcctcgcgttatgtccacgagggctgcttgcagtcatggcgccatgccgaccccaaatatgggacaagaaacttctggcaatgtcccacttgcggctttcagtatcgtctggagcgtctgacttgggctcggtggatcagtagcaccactgcccagctaattctcacacttggcattcttttgttaaccgtattcctgcttggattcatagctgaccccatcattgatttctacttgggccccgtggatgtttacgccgaattggccgaggaagatgcctcctggttaggacacttcctcaaaggacttgcctctttgggcctattatcattcctcaaggcgatatttgcgctgtcaccttttccttggaatctccggtctgtcgcatcagggcgcaattcgggccgtaaccgggtcgcccagttgaactggatagtggtcatagttggcattggcactttcctttgggtatgtgtggtcacattgactatatacgacttagctaacgcagacaggctgtctacaaaggtgttcgttcatggagtagacgaacgctagagaaggctggcgaacgagtcatggatgtcccactaccaggtgacgagagtgacacggacgtcccaataccggacgctggaatgaaggaagaatagttcaatgaactcgcactacttaagttgccgtactcctctgccccatgagacgtcgattagtcaatgtgcgaagaacaataactgccttcattaactcttgattgtctgcctgagaagtagatggttggctcgagagcgtcttgttctcaagtcattcgctgcttcactcatcaggcagctttcttggggaaggcagtccaccactcaattgtaaaagagcgtcctgaccattgagtctgatctattagcgcttttggattgagcagcggtaaattcatgtatagtcatattttctattgaatcttattgtcacatccattgtctattgtccattgtcacgcgtgtgccttatttagtaacttgaatgcattattatggcagtcagtcccatcttacaaacacctctcccatcccctcttccctcttctccccctcatctaacttaactctcatctcatcttcagaatggatctcacactagagtcccaagccgcgattctttcctctcaagtcgcgatgggcctcgaatcagagggatctggatctgctcctcatgcaaacaccgagactgcaaacacagagaccgaaccattccctgatgctgagccattccctgaatacaacgagtccgagtgtgagatgcttgcatcttccatcgcagccgacaagcgccatgaacaagcatggatccacgctctcggcagagccgcaaagcaagagatccgcaccctccatgtcgatcccaacattatcccgtatatcgaaggcgacccatctcaccgcagccaggtcatcctcgaacagctccgagaccttctcgctgacccgcgactgcgtcatgagatccgcgggcaatttattaccatcgtcaatgccacccttcagttcaacttcatcatctttcaccaaaccaaggagcttctgcctctcaaagaagttggagacgcagaacttcagctcgagaccgttctcaaccatgttgaatttatggatgagatgcttagagagcagctgaagtctgccgaacaggtttcttataccctcgagagcgtctcgctggagggtacgtcggactacgaacgactctgcaagatgtcgactgtgttcgctaagtaggtgccacggctcttgtttcttgtctaccctttgcttcggcagctctgatacgcagaacaggaccatgaaaaagccccgtctccttgaacgacaactgcttgctttgtacatggacatgtatgaggaatggatccgcactcctttcgtccgtctgcgtaaccgtcagatcctgactgaacagcaacctagccccacacgcgcaaagctttcgcgtcgtatcattattgtctgggagctgatgaccagatgtatcgaaagctacggtaccttgaacttgctgactcttgagatcaaagaacagtactttgctccggtgctgggttatctttgtgactcgccagacatatgggagcactgctgggatcaataccaggcactcgagaaggatcgtcagcaaaccgagcagaacagagccgctagccaagaggatatctgaacgatggatcaaagagccactggactgtggcatggggtatcttttccatatctacgattttacgatttgtcttcagttcaataccccagatgcaatgttgcacgcgacacagcgaatgcataacgaaatcaataggaacattccaaatcatctttcccataactaacctcaagctgtactatccttataagccccaagcttaaacagcttcttcgcattctcccttccaatcttcaaccgatccgtatccgacatctccgccgaatcaaaccactcacacgcatccccgaacgtctcaaacggataatcaatcgagaacaaaatccgatccgccccaacctccgccatacaaaagtgaagcgtagtcgtcgagaaatgaccagacgtcgtaatccacaaattctccgcaaaatactcccgaatcgtccgcttacacgtctccgcaagtcccagcatcttctttcgatcctcaaaccagtggttaatccgccacatatcaaacgggatatgctcccccaaatggccaagtataacctgcagcttggggttccgatcaaacaccccattcgtcaccatcccaaggacatgcagactgaccccgtgcgcgaacgacagcggaggcccaatcagccatttccgatcagcccagagcttgtcgtagatcgtgcctgtggggttgcgcgggtgcaggtacagcggcacgtcgagttcagtgcacgtcgcccagaacacgtcccatttctcgttgtcgtagaagatcatgtcgtcgccgtcgacgcccgcacgctgtgtgtcgttcactagggcccctaggaacccgtgctgtgttacgcagcgtcggagctcggcggctgcttcttgcgggtcgtgcatcgagagcgtgctggcagggttagctggatgtaccatatctatcatgcaagtattggtcttaattatggatttgaggaaacttacgcaaatgctgcaaactgatcagggtgcgctttcactttctcggcgatgtagtcgttgatctcaacggccagtgcttgcgcctcctttgcgtcccagatgtcctgcacgccaggtgctgtgtagctgaggatttgaagaccgacgccgtggcgctcggcaaagtcaagtcggattggtccgacgtcgttgatctctgctgtgtgcttgtctgtgtcggttgcgaacatgcccgcccaccattttgtcttttcgtggaatcgggggagcgcgaaggcttcttcgagggcgattttgccgagcatgttggtttttagtaagggagtaagggaataagtcagtaaggaagtagaaaggcttgaggatggagataatctgtatgattatcagctgttttatagtaaatgcggggaccccgcacttcggaagcgttcaggctttccatggttacgttggatcatcagccctgtcaatcggaatgcccatcggaatgtcaatcggatgtgaaacctgataagtacattgcgtatacaaggaaagcatccgacggcggttcggtgtcggggcggatgcgggtagcggttggcggcggagatggtcaaggacatattattgtttcctaatctaggtcatgtctactacgtaatatctctagccacagatcgcagcccaatcccatgagtaggtggatcgcgtttagactgaacgatttcaatcgcttcttcatcgatcaggcctttggcgaccaaatggctgacatattccatagtccattcttgacaccgcttgttggtggtctggaaagccaagtgtgtgagcttgattcagacgttaagatacttccatagaatatatgcccattcactcacatcgtcgacaggggccatgaagttctggttgatccccggagtggggatttgtgccgccgctagttcgatcttccctcggggggtggagtcgatggatggagctgcatctggggaatcaacgatgtcggacgaggcgacctggccgattggaaaggttcggtcgtgagggtcgagactggggttgtagtttcgtttgaattccaggacgtagcctgccatcggtgccccaaccgcgtggattttggttccccggtcgggattggtagctgacgggacaaatattgagaagtgggctctttggaagggtgtattgcgagcagagatgagataaatttttcttgtagccatttttcttgttggttgtagttgattgcagagggagatggatgtgagatggtgaagctatcatacacgagtcatgtggctaaccatcccaggtcagtaaaaaccagataaagaaccagtacataagagtaaccaaaaagacatatagctaagaccaatggtcgtatattgagaataaaagagagatgaagatacagtcacccgtacttccctgatgaatagagtgaggtacccaatgcttgacaaggataattatactcaatttgggtacatttatttcgattttcaattaagaagaactaatatttgttcagacgctaatctatacaacgtaggctcggagaaaggaaaccaaatgagaataacacatagcagcatacatgatgacaggatccaagattacttcgcaacaaacttgattccacattcctctttggggcgacaagttgcagaatcattccattcgggaagaggaagacgattgatccttttgccctgcccgtcaaccatggtaatatcaaaccgcatcatagcataaacgaccacaagtttcatactcaacgtcgcaagtcgctggcctttgcaagcatgctttcccgcaccccagccaataaatggtgtttccttttcaattccccgagacggatcccagcgagttgggtccgggtagtagttcgggttgagcgctgtatccgaaaatgggtaaataacgagagaccccgaggggataacgtatggcccgattgtaagatctgggccgtggttctttcgcactgctgtgtatggctgcgaggtgcgcagtgtttcgcgtatacagaggtcgagattgggtgtttgagattcccaggctgtgagtgggatttccgagagggcttgggcgagggtgttcccagagagagaggctgatgagggcgtgtgggtagatataaaggctctgatctcatcttgaacatttgaggaccaagttgggtccgaggagatttgcatgattaaccatgttactagaaggaataactatcagtgttgttatattcggtgtgaacatcaaacttgcctatcgttccggtggcacgagatccagctagggataatcctaatatgcactttgagagagtcagaaccctgatgaaattactcaaagaacggaaatatggaatacataccccaaagatttggattgtaccatctccatcatcaatcatctgctgtagcatatcatccctcttgattccgctctttttcctagtgttaatggcctcttggacaattctgtaaacttgaacagaagtaaagaacttgtagaacaaggctgggccaggtaaccaaggcaaccaagttgagtatgggttagtgatagagtcgatagtgtcgacaagtgacttgagacgagctgaaagcaccgggtcattggcgatatcaaatgaagcaattcgcatgaccagttgaaaggtgaccttagataaaaccagatgtctcagttttctctactaaagatataagttagatacacgcacctcgtgaagggaagagcagggatcgagaatatactcgctaccccacgcgtccattttacgctggcattcggacagaatcaatggaatcactgtattatcttagtcaatcttcaagctcgagaacggaatagactaacacttctgaagattatcacttcgttgaatcgaagccattcgtctgactacgccgccaacttgatggggatcaaattgagcagcgccctaatgcaagaatttagttgttatgagaccgaagcaatcaccggggtcttacactgcccatcatgattgagaatgtatcatgtaagccgagacccttctccttgaagaagatttttcggccttcattcccagatagaacaatggcggtatgtcggaacagactggtctgatagatagaagatgatgtagtcttgaagccatctttgatgaaatcaaacctcttctcaaagaacaactgggtgaccttccaaccaggcaattgcaagcgcggaagggaatggccactccggggcggagatgccactggcacgtgtagtaacttatacaacaaggcagaaagtagaagaatcaccgaggtcaagctacccaaatattgaagagtagacgagccattgcagaaagcaagtaccagtcgagtcaaagtgctctgcattgtgatgactagaaagaagttacagaattgagactggataagatagtccccagaaagtctttataccccggaatgataaggccgaagcgggggagctcaatgacgacaagtgtatacgccttcccaaagtggaataatccaatgatagcgagccaatgaccaaatctccattgctccttccctaaatgtcgaacttgccggttccagccagcgcgagtcaactgattcgcaccttccctgacctacagctcatgaactagcctattcaagtatatcttggactcgctgttggctgttggctatgttgtcagcattagcgccatgcataccaggatttagattaaagcggatcgctcaggcgggccgttgatgctaatcaggaggcttatacccccattttattttggtatgtcatcatttcctcagagtccggagttgaccgagttctgatgcctacatttcggggtctctaggttagctcaggcatccatggctttgcaaaccctactgatatagtcgacccatgtaatgattatggagaatgattataggcaatttcagagcccatttagcaccgagcatataagagcaaattagatattctttccattatagaaatcatgaggcttacaaggctgaatttgaatagtcgaggcgtgatgaggtgcgtggtccttgccttagccatctaggatcgatatgcgaaacctgcttttgtatgcatgcttcctgactccttcctaattaggcccttccacggtgaacctggggatcccaaggctgtgggaccaataaacgtctgatttcaatcccgaggtcatttcgtaccagagttcgagaatccattttatagaacaagatcttactattctgactatcatcctgtcgacccgtatgtctaactcatattttggcttggtgataatctataacttaagctcatttcttctcaactgacaatctacataggctgagatcaatatcaaattcacttcctatcaggttgcatttactgtagctacaatggcattatagaggccagaaccaacaatgactttgtggtatactccgattggctgtattctagtttgcatacaagcgcatccattctatgcctattccgcgctgttgggtgggtgcgccaccatgcacctggggtccagctgattgggttcggacgttgaccgaatataagataatctattatgccaatcctttatgcaaagctgccaactagagtagtagaggcgaccaataagaagaaatactaagaaaataaaattgaagaaaatcagcatttattctcatgattctcaacgaccaaatcacaggaagccgccgcctccatacaaactgcaagcaaaagcacctagactcgtggcatttctcgagaaattgcaattcggactaatccttctgtgagggggggttacattgggatatgacttccaagtctgttcattagaaataccaatatgtcagagtagttctatagttctatagtaaaacagaaacaaaacgatctaactaaggacattaccccttgaatccatctcttccaatgtagaccaaatgtcactccatacccttctgatcacgcattaaatcccacatcctgagccttgaccaattcctccctctcataaagaacttccggtcgaacatccctcctcaacaaataccgctgtacaaaaaccccaatttgtctcaacccatactgcgcatggagcctcgtcggcacagaaaagacctgatccaactcctcaagcgtcttccccttcgtctcaggcataaacaaaagcaccatccaccacccaaccaaacaccagcttgcatgccaagcaaaagccccctgtattgtaaatgcagcgcgcagcgacggccacgtcacggccagaatgaaattgcagaaccacatggtcgccgtgcctagcgccatgccgtacgaccgcatatatagcgggtatacttcggctgtgtatgtgaatggcacggggccctcgccgggggagtagactacgccgaaaaggtatgttcctgaagcgatgcaggcgagacgtgcgttgtggctgctctctgggatccagaagctgaagcctgtaaataaaaaggccatggacatgagtgggaaggtgagtagcaggagattgcgtcggccgaatgtgtcgatggtgtagattgctggtattgataggagccagttgattaggccctagcctaatgaggcggctagggtagctgcaggagaaaaattggcctagggcttattatgttaactatctgaagaggaaggaggattgatggattggactgacctcgagaaatatctcggaagaatagtatgagataacgttcacaccgcaaaactgttcaagttagtactttgcaattactgctgtatgttttgcgaagatccactcacctgctgcataaacataacaatctgagacgccaacatcgctcgccgatttcgcgggactttgataagttccagcagcttgttacgcccaagcttcatcctatcctcagcctctagaagagtatgcatgtagtacaggtcacgagctgcctgaattttatgattccgcagcacacagatagacctataagcacggtgatactgcttctggcgcatataccaatgcggtgactcaggacaagcaaagacaaaacagcaaacgaccagaggcgggaacatcgccgaggccatcatacagcgccaattcaagccgacgatgacggtcgagtcgacattgtagaagatgaggtccgacgcatagccaaccataatcccaaacgccgtccacacatgccactgcatgaccaacgcaccacggatggacggtggtgctgtttcggccgcgtatatcggcacagttgctgacttggggccgatgccgaagcctagcatgaatcgtgcgacgaacatcgcccaccatgttgagacgaacccctgccagagacaggtaatcgcagacaagcagcatgctatgaatattgtacctcggcgcccgaaccagtggttgaatgggactgttagccaggagctgatgaaggcgcagcagaggtatggtgctgaatttactagaccgacgagccaggcactccgagaggattcgtcgccgatgccgaattggtgtttgtagaatatctgggctccgttgacgaccgtctggtctgatattgtcaccagggtattcctcaggggcttggaacttctcgggctgaatatacttacccattccctggactgtagcggataaagaacacagtgcaatgacagcatacattttccatggctgtgaccagcgattcgtgagctcccggcgcagtactcccttctcctggtttgttagaccagtcacattggcatattgttctgggcactgtgccaacacagcacccaactcgaaagcgcggatatcggattcgtcgcccatctcgtggagctcggctaatgtgcgcccctgattccgcagttcggtatggctgaacccagccaacggattggagagtttggcattgagactgcgccgtgctcgctcggcatctgttccgaatggcgcttgtgggacgaccttctcggacagcatggtgtcaattttcttcttttctggcatctctattttgaagtctatggccaaaaggattgaggagacgatgtttggttttacggttgggaaggactgggttcctgggacaaagaaactcgaaagcaagcaaaacacatgactttagggctctttcctctcatgaatgaagtacatcaatgcaaatgcaggaagaattcaggtggatcttttaaagcacctgtcaaagaacgagacatgaggttcaaggtggactgaactaattgggtattcttgaaagtggctcattgcaaacaaaggatcatgatgtgctgtttacccatttcgggctgcgcctgcgcgagaaagtcgagtagaataaagtcaagtggaataaagtgaagaatgattcatagacttgatggagatgagtgggaagtactacgatgtcaatcagcacttccatctagggcacaatcttctcccatattgatgactaatcatgactagacctcggctctttccaaggtttctttcaacttggagatgttgaaaaagaacaatactacgaactgaataatggaagaaaacatatatgtttattaaaaaggtatcaatttcattataaattaggccagttgtgaaaatctgtgaaaatctgtaaatcatattagcaatgatctcatagactcgacaagagaagaaagtcaagaggctctgtcagataacatttatataacaatgtttatcaacaatatagttcagaacaggtctgtgtgaaaaggtcactcatcataagagcgaggagaaaaaataatataaaaagcacttaaaactcacattctgaaattttaactatcccgtccatgaaataattcatcatatcggagacagcttggcaatgtatgtccttggagaagcttggcaagctgaacaaagctacaagctatgagcttgccatgcacaaccacaaggccaatacggccgtttttgaagaaaaacggccatcaaaactaaaaaaaagacaagaaaggtatttgatgaagaggaaatgaagggaagaagaaaaaatgcgagcgccttaaatagtaaagtggattgcgagtttgcactgtttgcactctaaaaaaaaagtgggagctgcaatttgcccaagtcgatttctttagtttttgtgaaattattttggtgtactgtgtgggcagatgaatatttccgttattggaatcctttctcaaaaattatgaatgatatcgagagccccagactggaggagcaacagagtaagatcgtcctcagaaaataccccaaaaagtctcgactaatcgatatctacattatacagctcctaccaagtctccctttgcaaatgtccgtcccgatggtcgagccttcaactctcccaattggcgcatgaaggttgcaagcccaacaccatcgcgcaccaatgctagcccgagcccgagccccaaccctaaccccaatacctcccgcgcagccttcagccggcccggagcgcacgtcccccaagcgattaacgatgggcgccgcctatacgtcggcaacatgccatacacggccaagatggaggatgtggaggcgctgttcatagcggccgagttccctatgtatgcctgcaccacttgaaacctgctggcccagccgtgaatcgtcgtcaactgaacaacccccgaaaatagcgagcgcatagatattgccattgatccttttaccggccggaacccctcctactgctttgtcgacctacagagcaaggagcatgccgagcgcgccatgaccgagctcaatggccgcgatatgctgggtcgccctgtcaagatcaagcccggtgtcgccaagtctcaggagcgcattcagaacccgcctgagccattccgcattgatcgttggcgccagcaagagaaacctagctttgcgaaggtcaacagtgactccagcaaccgcgtgtacgtcggtggtctgccgcgcttgaccgaccacggggctgtgcagagcaacatcgagcttttcttccggggattcaaggtgtaagtttggatggcttgggtttctgctatcgtgtgatcagtactgatgcgctgtggtttgcagtgagaatattagcaaggtcttcgccccccaccccgctaagcggttcgatccgggcgagcactactatctgttcgttgatgtgggtactcccgagcaagcccagaaagctatggatacactgaatggtcagcaaggaccatggggtggtccgctgcgcgtccagttcgctcgtggtcccaaggatgcctgatctaagtacaggggcttacctaaaaaaagtattattaataataggatgtgtcgcattgtatcgcccattaagcgccataagtctaatgccaccaagcctacgtaggtagacttggagagcaaaaccgtttcctcgtcgaattggctgtctcgctcactcatcagtctgcggccaattcttttcttctattcccaaaattctaagtaattagacccattggtccctccatgattatctccaacactgttccaacactgtccgactttactggccataatacatgactcgctcaaatagcatacaacttggtataatcacagagcagaccgccgctaacacccaaccggtagtggcccagaatccagcaccaaaaattgataacaaggatattccattggacgtcatgatacgcctcctactctagttgctcctcctgtatattagtgagggtggaacagactcctctaggaataaaaccacgtggtagaccgaggttcacgccgaattgttagcccgtagcggaagacatagggcttattactaccattagcgaaggagacatttatactgggtgctatctcgatgaagttcaaattcaagggatttgatgtcatatatagtataatgcaagtaaaagactcacagtctgtcatgttcaaagattctgacatttttgcacctattactccctcttcgtcgcagaccagaactgcgtaactgctcgtcacatcagcaaccgtcctcactcacaagaaattggcaggaactcaccataagtgaacttcagcaacgtctctggctgctcggcatatagactgtcgatgctcttccttgacgtatagtccacatcgaacccgagcagatctgccagctggagcacttcctcagcggagagctggagagcggtgtggctgccccattttagcgctgcgtacatacacgtcagcccgagttcggcggtgaacggatcacaagagatgcataaatgtcagtgttcaaggaagggaggacagtaacatacgcccaagattgatccacaccccaccaggctttagtagccgatgtatgttgcccaagaaatcaatcacgttcttggaaatgtcgatgaagaagagcgtgacgacggcatcgaactcaccgtcctcggggaacatctctaagaagtcgccctcgacgagcttgacggccttgtttggccagtggtccggcaccgttagggcggaatagcgcgaggaggggttggcctgatacgtccatttggtcacaaagggctgcagggtgtgctggtgcagcgaggtcgtatggttcgttagcaggcggtaggccaggatggagccgtagtccagctcattggccgtgacatcgtaccctgcaccgatgtgaggtcgcgccttccactcaaggaagtaaaatagacgcacctatatcagcgatatcgcttgccagcctgcccatgccgcttccgggtacaagtaccttattccctctcccgttcccgccaaaatgttgctcaagcccatccagaacaggcggaaatacggcctgcctctcctttacgccctgtgtgctccaatctcgcgaaagatgcccaaacgccaggtccacaactccaaactccgcgtcttcattgtcctccagtgctcgtgggccggtgtggtaatcctctctcgcaatctgcgcgatcttttccgagaaccgggcattcacttcgacccccttcctagctttctcgaagtgtgcaggatagccgagcttgttgcttatcgccttctgcgcgggtgtctgcttggaataccgcgcatgcttccgctggagcacttgctcggcgaggaacggatactgctcgaaggaattgatgcagtgcgccagtccattgggaagggaggagtatcttttcctgggtttggcaggctcggcggaagcttcgaaggctcctccggagattggtgctggaggggcggcaagcggggcggtgagcggggaggtgagctcgacgtgaagggcttcggcgcgctcggagagggaggagaggagaactgcgatgtcggacaacgaggcagagccacggatagcgaggtagagggggaaggcgatgcagaggaggagagcaatgaagcgggagatgtagatagaggtgcgcatcgttgtgcttgtggcttcaagatggacgtgattgaagagcgggaaaggcaccacgatacagtaagacaccgtgtaactgaggcaatttagggccaattcgtggcactggatatgtatggcttcaagaaccagcgaattaaagcatatgtcccttagggttagtctcaaaggcgggggtctgcataggcgacttcttccatcatgcacagtaacccgactatttcggctatctttaatactgcaactatcgcgtcctgctcgctatccccttcctggctgaattatagccatgggctgttcgattttgttcctctacgtactcaccgtcctcgccgtcctcctcagcgcccatgcgcacgaggaacaaccacaaaagtgtagcaaactgctgatacgcaaagaatggcggacgttgacgaacagcgagaaagccgagtgggtgggagctgtcaaagtgtgtcctccttcgtaactaacacgtacggtacattgcttataccgagtagtgcctggcaaacatacgacacgaacggctatccttgacgaaggaccagacggtgcttgaggggaagaggagcctatacgacgacttctcttactcacacgcatcagtggagcacagcgcgcataggaatgcctacttcttgccgtggcgtgcgttccgtccctccttatcttccccaggcgcatacttacatgagcgcagatcgctggttcacctacctattcgacacctcactccgccacacttgcgggtacagtgggccaacaccatactgggactggtcgcgcgatcacgcggacctgttcaactcgccagtattcgaggattcaccggagtacgggctaggtggaacgggggactgcgattcctcccccgaggcagactgtaccgtcaccaccggcgcttttgccccgtcgaccggcaacttcaagctttcctggccgatcaaacacccgctgcggaggaatctaacgctcataaccggctggtacccgcatgagctgcctcaaaatcgcaccctcggcccagatttcgtccgtaactcaaccgagcaaaccacgggcgacttttttaggttccagcgcgcaatgacactaatgcacaaccacgtacataatttcgttgggggcgatttggccggagactgcccgaagaccctgccggaggaggattgccagggcatagcagtcagcttcacgcctaatgacccactattttggctgcatcatacgcaacttgaccggttgtggagtgaggtgcgcccccgaacctatgatacctccccgctccgtatttcggctgcagtgcaacgctactgaccagttttacagtggcagcgccatcatccatccaatttcgccgccttttcgggcatgcctctaaccccgcacaatatgactgacccacgctacgaccttgacgcgcacgcagatcataagatgtccttcgacgttcagagtgtgcccgtggcaccaaggaaggtgtttgatacggagggttggccgttgtgttaccggtatacagacgaggagtgacgggtactagactagactaatacaatatcttggagttcagtcacatcagagtcatattcactcgagttgggttccggcccatctggtttctcgttcttggtgaacggaaacgaggaagcgaggtgccttgctcaactagttctacgcacatagttaggtactctcccaaaccccaaagaatagttgtctagttccatacgacgcatattctttatattcccattctatacccactagattattaactcgactcctgaaaccttgtatacatttctggtgtccactccttatgctggttttccatccaatcatgcacctgtctccagtcccggcaggtatgtacggtccctccgcccgtagcaactttatccccattagccaatttcatgttcgtgccgcccgactctagggttgtgtcagcggcgcagagaatgccctgccgtaggtaatggaagcagtgcgccgtatggtccgacccgtcgtccccattaacaagcaccgcgcgtatatggttaaggcaatgcatctggtgccacatcgacacatcaaatgcgaagtgctcctcccctagaaaaacgaaacccttgccgggagggcggattgcgttccattcagccgtggccgtgatgccttccataccgtaatgggaggggtcgtcgtggaaggcggcttggatggtgcggacctttatggggagctcacgaggtcggtcgccggcgaggtaggctgctgtgcgttagtcatgagtgagaggagaatcaggaatatggcgcactgtatccccgcgttccgcgtattaagatgcggagtgagaagaagagggcgcccagattcaggatgaggcatacgctcagcgctgcgagaaggccgaggtaggggccgcttaatcgggtcacggacttagggaacatattgggtgtgcttgtagggtggtgcgtggagggtagcagagggagacgggatttttttcagcatcaggagcgggttaattgtgtctaacacatctatggccgtatccgctctggcttgggtaggtaagtcacgatggtcccgaagacgcaactgtcgagatgctctattcgccagagtgtttcttcaatgaagtgaagactgccagtaagcagagaagtacacgtagtgcagtttggggctccacaaataatcctaccctactccgtactcatcacgagagatagacacggtgatcatccttggggcaaataatgacgacaccctgatttgacttcttgctcgccaggtggctagtcaatgaatctcgaggaatttcgggttatcgcgcccctcttaggaccaaataggtaggtggttgagaagagaagtaagaattgtgggtaatgcttatctccacactactagtccttccagggctgtgcacgccccactctcgcttcggtccgagacatagttactccgcatctatagagcatatcacatcatatgcattacagatttacaattacatgtaaggcctcctactcctctatttttagtagtgatcgtcgaccagatgaggggacgatgtgagtcggcactttgactcggcacctctcttgttctgtttcggatcgcaaacgcataaattctcaagggcataacgagcactgacaacatctcaacgatccaccccttcatctcacacaaccaaagcatccgctcgctgccaaactccaacaatgcatttcaccaccctgctcagcctcgccagcctcggcctgaatatcctccctgtgcagtccgcagcagttcccgccgctgatttggctcgccgcgccggacagccaatcagccgtgtctatcttcctaacacggtcgagaagaggcacacctacggagtggatgaagacgaggcgctcgagaagaggcacacctatggagtggataaggacgaggtcgtctgaatactgttcggcggcagataaccaaagtctcgcatgtaatgaggttttaaaacgtctataacatgttctacaggcgggcaccgcattctcttcacaactttgttacatagcagtatacattatcaacagagtatatcaagcactatcttggctatcttttctgcatgtacatgtattatgtccagtctctctatacattgtaaggcgcgctagagtgccgttgcgttgcgcaattgtacattaagataagagaggggcgcaaagttgcaccttgagaagcgtaaagcgacacacctacggggtggatgaagacgaggcactcgaaaagaggcacacctacggagtggatgaagacgaggcgctcgagaagaggcacacctatggagtggataaggacgaggtcgtctgaatactgttcggcggcagataaccaaagtctcgcatgtaatgaggttttaaaacgtctataacatgttctacaggcgggcaccgcattctcttcacaactttgttacatagcagtatacattatcaacagagtatatcaagcactatcttggctatcttttctgcatgtacatgtattatgtccagtctctctatacattgtaaggcgcgctagagtgccgttgcgttgcgcaattgtacattaagataagagaggggcgcaaagttgcaccttgagaagcgtactacacataataattccaggacaagacagccctccagcctgcatctacaagtactcatccggcatcgggataagtgtctcattgttagccgcacacatagccggatgttcctccggaagagcctccatgtcagccatcttaacgtcggagcactatcattgcatcagcatcagctctactggggcaagccagagctactgacataatgttccacattccccgtcttcggatccctcgcttcgaagtatataactcccatctcgttgacctgggtctggaatggtatcgtgacattcacacacagctgtcccgagggttggatgggcacatcctgcaggatgatgtagggaaagtcatctctcttccttggtactctatgtcgagtatagagggccgtcacaaggtctccaggatggccggagaacgagagaaaactacgggagcggcgggagtatcgttgggggttatgcactatctccccttctgtgtatcagcctacggtactactagaccggagacagaggaacataccgcagaaagggttgtaccaatctatctctgggcgggccttggggtttggaccgcgggtcatccatgggaactggacgtggaagccggcatgcgcggcggatgtgaggttgatgttgatgccgagggcaagcaggaaggtgattgcagcgaggagggagggcatggtggacagaggtcagtgcagcacggtgtagagagcgagggcaagttgaagtgatctcagacggtctcactccttggccgcgatgatctgtttgaccatgcagaaggactgagtttctgatgcatcgtaactttactatctatggcaaaacttaatcggtccaacactgacccaaaccccgatgtggttctctgcttttagataataataaaaatcttagaaatagtgtttttacaaattaagttcgtaatactaattcaatgatatggtcgagatatatatatttttggaagtaccctttatatgtatgtcccatagaaaaggtacaatttgcattggacccgcaagatccaatccccacttcgggcccccggcggggccccggcgggggccccccccnnnnnnnnnnnnnnnnnnnnnnnnnnnnnnnnnnnnnnnnnnnnnnnnnnnnnnnnnnnnnnnnnnnnnnnnnnnnnnnnnnnnnnnnnnnnnnnnnnnnnnnnnnnnnnnnnnnnnnnnnnnnnnnnnnnnnnnnnnnnnnnnnnnnnnnnnnnnnnnnnnnnnnnnnnnnnnnnnnnnnnnnnnnnnnnnnnnnnnnnnnnnnnnnnnnnnnnnnnnnnnnnnnnnnnnnnnnnnnnnnnnnnnnnnnnnnnnnnnnnnnnnnnnnnnnnnnnnnnnnnnnnnnnnnnnnnnnnnnnnnnnnnnnnnnnnnnnnnnnnnnnnnnnnnnnnnnnnnnnnnnnnnnnnnnnnnnnnnnnnnnnnnnnnnnnnnnnnnnnnnnnnnnnnnnnnnnnnnnnnnnnnnnnnnnnnnnnnnnnnnnnnnnnnnnnnnnnnnnnnnnnnnnnnnnnnnnnnnnnnnnnnnnnnnnnnnnnnnnnnnnnnnnnnnnnnnnnnnnnnnnnnnnnnnnnnnnnnnnnnnnnnnnnnnnnnnnnnnnnnnnnnnnnnnnnnnnnnnnnnnnnnnnnnnnnnnnagaggccccgtgggggggcggcgggggggagccccgcccccgcctccttggccagcgatgacgaacgcacaagggtccacttggccatgcggaagggcggagtttctaatgcactgtaactctactatctatgatgtatggcgagcgcggtgagcagtaaggcgtaccaagcgtcgggtcgatccgtccccgccgccttgtttcgccatgcagaagggccaagtttctgtaactctactatcttcggcgaggtgcggtgagaaataaggcgtactaggcttcatgctgtcatactttctgagcggttacctggaatgggtgccatagcctgttttacgttacttgcgtttacctgcggcgtgccctctctctctggctcgctctgctctcgccatgtcctcctctcaaggaaagtccagctcttcccaatatgagcctctttcactacaagatgatggagaaggctccagcgcaacttttgagaagcgctcctccgaggacgaccactctacccccttgttggaagcctcggacaacctccccgccctcgcgccatccaagccctcccagctgcccaagctcatcctctatttctccttcgccctagcgctgctatcagctgtgaatgtcgctctccttcccactacactatcaaagtaccaagcctaccccttctctgactctgacctcgaggccctcccctatggcgacgctaggctgggattggacagggtagcgaaattcattccccctcccaaggtctatcaccacacttggccggatagaattgcacgagtgagccggagattgaagaatgccgtgtggggtcagggggtgcaggtctatgttactgtcgaggtccgtactccgtacttgctccttcctcattctcttcactgacgcaagagaaggactcgacaattatgcgctttcccatctcccccaccggcgtcaacacctgcgcactctcctggcggccacctcccgagttctctccgcgtgccaaagacctcacaaccaagggagatataacagaaattgaagtctggcagcttatcgcaccctcagacatcttggctaacgtctcttccactatggacgagctcgattatgataccttatcgtattcgacccttcccgtgcgcggggagctgctcggcgtacttgaccttacagccaagccgaacagcacaacactggagttcgcctgtccccgcggggcggagagtctagtagtggaaatgaggtgccagcgcgtggcgtgtcatgtgagctttatgcaaattcatatagcaccgagctttgggtttgagttgcttgagagagcataaagtgttcagataaacttcacatttctcaactagctcaacaaaagcaatcaaatagcattcatccgaataagaaattcttttcattccaaaaatcaccatggccgtggttatttttggaagaaatccagctggttgatacagtcagatgtcctcgttggaaaataaccgtccatggtgatttctggatgatcgctggcaaaagggtgcgtgttgcaatggatgagaaggatttcttatttgtgggagatgtaatgactcatgaggatagacatgactctaaagattcttaaactcggaggaatcgacctcgtacttatagaaaggcatcgggtcaatctagaaagcggggtcgttgggtagaatgttcttttactatcgcgatgaagcgtctgccgctttggaattttaccttgataactagtaccacttcgtaccctatctataaaaggtcctataccaagaagttgaagtttcaagaaaattgccggcaaaatgtcccagagttatctcaatccaaatactccggagtccggtagatgcctgaaagagtggggtggggctttgtcatagtaaaagaatgtcacaatatcaacccccagtagcttaccccatactaatcttgcggtagtgtgtggcactataagatgtccccataggcagctcttcggttgctactacgcaaaacccactcggccatattgtgtctaacacccatcgagctgcactcacaacatgtccactcaactcgacgccgcctcaatcgcccgggtctccttacacgaccccgctcacttcagcatccagcactcccaaaccatccaccgcctagtgctcctgcagcattggaacattcccactgactccaaggtgctggaattaggatgcgggcaaggagactgcacgactgtccttgccaatgctgtaggcgagcatggtagagtagtggcggtcgatccggcggatttggattatggtaagtcctctagcttttctgaccctgctgcctgtcctgggtcgactgatagcccccgcaggtgccccatatactctcggccaagcacagggtcacatctcgcaaggcccgctgggtggacggattaattgggtccaacaaacccccctggactacctctcttccctttcctcgccgcccgccagcgaaagtaaggccttcgacgcgacagtgctcgcccactgcctatggtacttcgcctccccatcgcttatcctttccaccttccgtgccatcaagcagcacagcaagcgtctcctccttgctgagtggtcgttagtagcgacacacccctccgcccagcctcacgtgttagctgcgctcacccaggcagcgctggagtgccgtaaacctaacagcgaatcgaacgtccgcacggtactgggcccaacgcggcttaccgagctggccttagctgctggatggcaactggagagcgaggccctcgtgcaaggtggggaagggttgttagacggacaatgggaagtctctgcttgtctttcttcctctttcgaaaaggaagtagaggagctagtggttgatgagagagaacgggccgtggctattgcgtcacgggatgcgtgtgaggcaagcttgaagggcatacaagggggccggaaaggagttagggctatggatgtttgggttgctaatttcgtctgattgggcgagctgagcgtgtccgactcctagacctcttctaagcccgatctcttgatcgagatttgccgtggaagattgcctaaagaatatgtcttgctgcgatatatcagattaggatcctccgaaagttgaaaattaggtgctcccgacttcctaattaaaaatccggtgtatgttggcagtatatttgatagttcatggtactggtattcccgccaagaagaggcttgtagcgtgcatgcactagcgtcccttctcggccgggccggcatggcagggtagaacggaatcgaaacagcaattaaaaacaaccttacatatcagaaccaggttgatactaaaaaatgagggagcagaagcatttgcaatagacctccgacaatccggcagaaaactcgactaatgtatctgaagccacttcttggcagtaataccaagaccatgaattatcgaatatactgccggtatataccggcttcctaattaggagattgacagcacctaattttcaacttccagggtccagcggaccgcaatgttgagacaacactaatgcacgggcggattgcacgcctttattttgccagtcgaaaaattcattattaggaataggcggtctatcaaagcggtcaaaagtggacatgctggggttactaatgccttcgacctcatggggtaattatatagacggcctatggaattacaaaattgtccgacctttagaaagctacacatgcataaatgcttatctttggtcaaattaactgcctcggccgcgcataagcaagtccaggggtcggcatataacccctgctacttcgtccagagattcgaaatttgggatgaacttcggattctggcagatattttgagccagcgataggaattacccttgccccgatgtttctctagataattatagctcccattattcttccttcctagcagaatgcgtgacattctaccatcacgccatcttgctggtcccctttcagtactcattccccgagttaggccagctacggccagtttctataaccgccagtgcgccacgatattttcaatagtaagttttgacctagctcaccggattttcatcatttgctcgttactatacaccattcagtcaggcctcgacacatgagctctttgaatccaattttaacgctacttttgcgagatggcgtccgatgttttgcaaacgctgcagttctggaatatgctctaatacgtgcatgacagctatcgaccaatcccgcgcttatatggcgtcgcttgcgagggtccgtatttttggaaaagaaatttcaaggggccggtcaatgcatgctcgacgtcaaagactcaagggacgctcttgttcgtgtcaatctgacctagacccgctaagtcgcaggctatattccaatctttgaacaaagctgagagaaaaaaacgtattcactatctatcgatgtgattgtaaagtatatgcctgggcgcacgtctcttccgctcggccaaaagaccattatctatagtagtgcaatgcttatatcctaccgtagtgtatgcaggtgcgggttcctgactttccgggtgaccaacctataggggaccaaagaacccatttggtagggtcgatgtgaatctgacctgggagtcgattctcacaagactggatatctttggactcgacctgatctcgagtaagagaacagccccgaatcacctgcgtcatctcgggaggatacacaaccgctgcagggatgtccgcctattcactcggttccaggcgttgataagttgacaaagagcaggaagatccatgcaacgctagccatagcgtcaccgagtaaccacgaggccatttgttgatgttagtctagactttctcggggataagaaagataaaaccgttaggccgtaaaaccgagccccacactacggactctggagtaatggctgcggtatgcgacgctaagaggtgctacttaatataatcagtctcagcagcgaccaaccgcaggctcgtaattctcactctactacagtgccagatcaaacacggcggagaccccggatttcttagagagagaatggcattcccatacaagcatttcttggttatcggcgcgacagctggaatcggcaaggcccttgcgactcgtttaattgagtcgggggctaaggtcaccgccgtgggtcggcggcaggaccgtctggatgaattcgtgcagactttcgggcctacacatgcgaaaggcgagcggttcgacattggagagttggtcaagattccagattttgtcacaaggtacggtctatttcccgaggtccttagccggggctttctacatactaacggggtgatggacaacaaatagggtgatgaaggaatcgccagatattgattccattgtatttaatgctggggtgcaaaacccgtacgatctggcagatctcgacaactttgatctgacggcgtttcaccaggaagtgaagatcaacttttccagcttcgtttctctcacccacgcccttttgccatatcttcagaagaacccgaacccaactagtttcatcttgtaagacgcctacccggccgcaatctgcggcaagagctaatggatgtatcagtaccggctcgaatttggccatcgtgcctgccgccacgcttccggcgtactcagcatcgaaggccgccctgaatgtctttactctctgtttgcgggagcaactgcggcactcgaacaccaaagtgatcgagatttctcctccaccggtccagagtaaggcaaccctggccccataatgttgatatttcagtgctgacctttagctatagcggaattgcacgactacatgggagaggatgcgggtcgccagttgggaatgcccttggacgcattcacgcagcaggtttatcagggactgaccgagggcaaagatcagattgtaattggcagtattgggccagaagacacattcaacgggattgtggacagccgtcgcactgccttcgagaacctctccaagatgatgcgtggtgggaagccctagacaggccgcagatctacggacgatcaagaacgctgcgttcttcgattaacctagagaccagctggaatgaatgctacttatgtttgaaatctctatgccatcaagtctttgtatttaccttcagttcatgtaccctctcttcgccttttagtaaagccttgggacgctcgaggagcgccttgatggcaaccatctgtgggccactgcggtacatggaactactgtagaatgcataccccgtaggccatggtgatcgtgaaataacaaagaatcgagtagccggtccattacagacgcggtctgggaaaactggtgcatcttctcaggggctagttaccaggtaactagttttaccgtaactgagtgactgatcacagcggtagccccaccatttaagccagtattcatagtccaacatccccgcgatttgtatggaatagacggactcaagccaccaggggtcaccaccccaacaaagttgcccctcgcccatatacatatcctgaagtcttccgcacccacccagaaggttctgtgggaaataatgggcaatacaactctggcctcaatccctcagtccaccaaccccgatgtggtcgattgggaaggcctagatgatcccctgaatccgatgaactggcccctgagaaagaaagtcgctatcaccatcaccgtggcactgctcactattttaacgtatgagactgcttcccaggcccccttcgtcggtagttcggaaactaaaacgaagagaaatcctaggccactgggatcatcaattgtagcaccagctgcctcccagatcatggaggaattccagcagccctaggatgatgagttgcgtgcatttgtagtctcggtctacgttcttgggtacgcttttggaccgatgatcctcgcccctctgtctgaattatacggacgcaacataatctatcatgtctgcaatgtactctgcctcctcatgaccatcacgtgtgccctggctcctaaccttctgggcttcatggtgtgtcgtctgctggccggcacggctggcagtgtgccattatccatcggagcaggatcgctcgcggatatgattccctcaaagaaccgcgggttggcaatgggtgctcggtcctgtgcttggacccgtgacagcgcccataggtgcgtatctcctgacgcctggagcatactgacagatacagcgggcggatatttggtagagtctcaaaggcctttgatgcaggcgccaacggttactgtcgaggagaaggggtcggagtagtcgtgctcaaaaccctccctcaagctcttgctgatggaaacgaagtcctgggatgtctatacgacgttcgacgaggtttccgagaagaagctagtgaacgacatcctagtctttcaccctgtcacaggtgaactgtttgccatggtcatgggcgccacctttcatagtgtcgctatgaagtcactcgtcgccatgctggcgaatctcaatacgcctggtgtgagtctggcgaatactcaacctgcgacaaatggaacaaagggggtgaagaacagccaaactttgaattccgtacacaccaatcttcattccacaaataaccgggatagtggtagcattgttggtattgaacagaacctggattggattcttagtgtactacggcaactactcagctcagcgactgagattcctgttaacgagattgcaccaaccacttatctggcaaacattgggatcgacgcgctcatgagtacggaagtcttgagcgatataaggcgacagtttcatgttgatattccgatctccgaattcatcgctcttgacacggttctcgccatctcgaagttcccgcagcatgcatttgagcacactctactcgcatccacgggttccaaattcgccgaatgtcttacccggaaagccgacctactggagatattctttggcagtatcaaatctagagccttgctggaaaacgtctacaccaacgcccctatgttcgccgctggctcagatacgctgtggcgcatataccacccgtactttcatcattcacggcacagaagacgatcttattccctggaaacaggcagtgagaacttttgaagcactgcgacaacgcaacgtcattgcagacctccgcattctcgatggtgcagagcaccttttcgatctctacccaccttacaaagatgatttgcaggcagcaaaagttgtgcaggatggatatgaatctcttcgtaggcacgctggactgtgattagatcttgtgcggatattttggcacccatcatattatacttagaaagagcattacccttgtggatatatgtgttatttgttatgtgaggcgagataaactgtcgagttagtcgtggcactaagcattactgcaactttgtgaggatagggcctaatctgaagtggcaaattgacaaaggaaacaatgaagaaccagcagatgtgacgtaacctagagaaacattgatgtttattatggcgggcagaacccttaggcggtaggaagcaatgagccaatatgataacacaaaacagtccaaaggcggtctaaatactaattgtttaacaaactcgtgcaagcccatttaacttgccataagtgattgtagagcgaagcgaagtacagtaattaagtcatagcctcgtgtgcatgtcatatcaccaggtcttgtcacctataggtcccaaaatcattgaaattatgtcacgtgaagtgttatcggctaactttggcagaataacccaaccggcagaataaatacatcagtccctagagaatgaaccatcattatattccccagagcttctagccttacaccgaattagcttcatgtcgttgatagatcattggaatatttcatacaaacagaatacaaagcttttctacatgttacgagatcaggccgtgtttgcactatttacagtgctgcagcacccccgcagcactgcactaccgaaccaagggtccagtactgcagcgggactagtgctgcggcaccagtgctgtgggatttctcaaggcctaaactgttaactagttagttaaatagactatattcgaaaggatattaagaggataaacacggttggcacagtattaagagctatactagcttcctagttttatgttgggacagagagagaggaggttacaacatacaggacgtattgaggagctgaacccaaataggcaaaactaaccacatacagtagttcacaggtccgccgtttctatgcataattatctggatctattccctttttgttctttagtgctgttaatatcagtgggctgacaacgtagcacgtgagtgatttgaataacttggctagagacaatattgaagttgttatatatgacacatgacggatggccggactggcgggccacttttcttttataattagctcatccgcacacccgaagatgaggccacctcgaggtattcatatttgaagccggtgagagtactgagtactcaggtcaagagtccagtaactatatactatggcaacatctacactagctcaatgaaggataccggtgtgtgccggaagacaagtatgtattacacaaggtggtcaatccatttgcgcactgaatatcgaacttttatgtatactagtcaattctctttggattgcctacctgtcgtatgtccggggtataagcgcccgtataaaaacagccgcagggagacatgatccctgaaaggttagtaggtatgaagtatgaagaactgcatatgtatgtagtatagcgcttggcttagctttcgcaatttagattagagatatcactacatgaagaaatccccgcatatcagagaacaaggcattgtcatacataaatattaatactccgtgaatctatcaaagatgtcaaagtggattgattcatgacgttagtggggaatccagactcaccgcattatgcgcctccttgaattctgtttcttctgtttcttctgttctgtttcttcgggttttttatcttttttttattcttttctttgtgaattcatactataatccattcctacagactatattctccatatcttactcggccagacccccatgttgggttaagttctgcttcttggtccttcggcttcgggtcggaattgcccctaatcttcccgaaattctcgtatttgccattcttcatataacctcaacctcaaaatgttaccaaaaaatgtccagaataaggcattcgttgcaagggtgagtgcaattccgctagatctctgtttttgtctgatatgcacggggtcggtacattgttacgttgccgaggcttgcattatgtgtatgtgggttaggttgattggggattgtttgacctcatatgttacatgaagtataagaaatataagatgcctaaatcgcatcgtccgcgcgatactgcgttactctgatcgcgcgttactgcgtttgggactactatatcttctgtcttgtttaccttctgtctcttctctttctcacaactcccacaatcggacattctttcaatattcatctggcttttcttcgtgaaaggcacaactcagaatgttcgccgttaacttccttccgcagtccgacgactcaaagatatgtgttgtcatggtgggccttccggcccgtggcaagagtctcatcgccggcaagggtaagtgaacctgccatccgtaaatgaatgtgagactaactccgcgactagccatgcgctatctgggttgggtcggtatccctgcccgtgtcttcaacgttggtagctatcgccgcttcagcaacccgcagccaggagccgccttctttgacccccacaatgaagagggtgaacgcatgcgccgagctgccgcagaggctgccatgtcggacatgcttcagtggttcaagaccggcaagggtattgtcgccatcttggatgccaccaactccaccaaggagcgccgcaagtggatctatcagaagtgcactgaagctggcattgaggctctctttgtggagtccatctgtgatgacgaagatctcatcatgactaacatcaaggaagtcaagacgacctccccggactacaagggtcaagatcctgaggtcgctgcccttgatttccgcaaccgcattcgcaactacgagaaggtgtacgaaaccatcgacgaagatgagaagaagtacacctacgtcaagctcatcaacgtgggatcgaccgtcatcatcaaccagatcaaagattacctgtccagccgtctggtctactacatccagaatattcacatcaagcctcgttccatctggctctcccgagtaagtcaaaacaatacagtttccaaccattatgtgaagccttactgacgaaaatagcacggtgaatccgagttcaacctgactggccgtattggaggcgactcgaacatctccgagcgcggcgaagcctacgcccgcgcacttcccgagctgctgcgcaagtctggtgtccctgacaacaccaagatcgtaatctggacttcgactttgcgtcgtactattcagagtgcccgtcacctcaaggctgcgactggctatgagaagctggagtggaaagccctggacgaacttgactcgggcgtttgcgacggcctgacctacgaagaaatcgctgagaaataccccgaggatttcgctgcccgtgatgaagacaagtacaactaccgctaccgtggcggtgagtcctaccgcgacgtcgtcatccgccttgagcccatcatcatggaactggagcgcagtgagaatgtcatcatcgttacccaccaagctgtcctccgctgcatctacgcctacttcatgaacgtgccccaggagcagagtccctggatggaggtgcctttgcacactctcatcaaactcaccccccgcgcttacggcaccgaagagcagcgcttcaaggctgatatccccgctgtctcgacctggcgtggaaagggcacttcggcaaagcaccaggaattccccgctgagggaggaaagaaagaggacactgagaccaagcactaggggagtgttgatctgcatcggcgcggcgtcacctggatgtggggggaattcggattgcatgagatattcagataccacaaacatgcttttcctttcattatgcgttagttagcctactttaactgaacaatattattcttacaaatcactttttaccgcgggttcattgtaatattcacgcgttatcggaaagttgaagttttcgacacttgagcgacgactgagcgacgactgagcgacgactaagcgacgactaagcgacgcctgactctcagttaccgctcacttctaacgcgcgttacattctaatttgtttctatcagagaaaacttgtatgaacaaacgactagagaatagggcccgcgcggccagatctcgggatatagttatgctgactcagaactgactcagctcggacgtcatgcggagagctccagcagcggcgctcctcgaacctccagtggaaggaattgaagacagcacgcccatgttgtcagcattcaccgcgcggccgctcgtggagctcaagccgcgcgacaagtctcgcattgaatcagtcctagcctacggtgaccgcctcctcactggtttgaacaatggcaaccttcgcgtctaccgcgtcactgacgacggcaagaccgagctccttcgagaactagagaaattctcccgatacaagattgaacagcttgccttgattaaggaggctaacgtactagtctctctttctggtggttatgtctggctccacgatgcgcagtcgtaccagcttgttgaacagctaacccaaacgaagggtgcttctgtatttgccatcacgtcgaatgttgtcaatgatcccgatacaaatgtgcctgctattgtttcccgcttggcagtcgctgtcaagcggaaaattctcatgcgggcgtggcgcgacatggaactggagcgggatacggctgagctgagcttggttagtggggtcaagactctcacctgggttgcggctacgcgactagttgttggactaaactcgagctttgtcatggtcaatatcgagaatggacagtccacggacctggctgggccgggcagcattgaggaagcaggccggttcacgggtgttggcgccgcgagcatgagttatattggtatgggaggcatggtgccgcggccacttgtgacgagactgcgtgaaggtcagattcttctggctaaggatatcaacacgagtttcatcgatattgacggccaacctcttggtcggaagcaggtgccttggagccatgccccggtggagcttggatactcgtacccgtttctgttggctttacatgactcatccaaaggtgtgttggaggtacgaaacccggagaccttgtcgctactgcagtccatcccgctgccgtcggctagtattttgcacattccgcagccgaatatcagcctcgcccatgccggtaaagggttcctcgtggcgagtgatcgcacaatatggcgtatggaagccctgagctatgatacccagattgatgctttggttgagggtggttatctagatgaggctatcagcttactcggcatgctggaggatgctctcttacgggataagcctggtcgactgcgcgcgataagacttgaaaaagcgcagagcttgtttgccttgaacaagtaccgggagtctctagatctttttaccgaggtgtctgcacctcccgagagtgtcattcgcctctaccctcgcttgatcgcgggcgatctctctatagtcccggagtctgaaactctgaatggaaagacgaacggatcgagtgatgggtcgggtgatgatgttgctgctgggcagacatcaacacacgcagcctctattatatcatctgtgccaaagcctgatgaaggaagcgaggctagcagtatccgtggagacgacaaaggtacgacaagctccccttttttttgaatatatgctaattaatcataggtcttcgaatcgctgtccgcgagctacaaggatacctagcagatgttcgccgacgcttccagcgcttcctcaaccccgacggatctctcaaagctgctataccagtcgaagccacagatgaggcaagtgactcggttcttaagttactagatttcccatctcccgatgagtttgcctcacgaatttgtgccaaggcacggttggttgacaccactttgttccgtgcacacatgttcgcgacgccatcactagctggatccctcttccgcattgccaacttctgcgatccagaagtagtcatggagagactcgagggcactggcagatataacgacctaattgatttcctttacggcaagaaattgcatcgccaagcactcgaattacttcagcgctttggacagacaaataacggacctctgagcggcccgacacgcacagtcgcgtatcttcaaaacctacctccggatcaaattggcctggtactcgagttcggagaatggccacttcgtgccaaccgcaagttgggaatggagatattcctgaccgacactgaaaatgctgagacattgcctcgtccacgggtcctcgcattccttgaaaacatagacaccgcgcttgccattcaatacctcgagcatgtcattgatgaatggaacgacatgacgccggacatacaccagcggctgctcatcttatacttagatcaaattacatccaacgagcaaggggaatggaaggagaagttcttgacgatgttgaaagagagcgagcaatactcgccagcgaagatgttagatcggctcgatcgagagggtacattgcgcgctactcctgtgaaacaagccatcactgacatatcccagatgccaacttctacgaagcccgagctattttgtttagcaagatgggtcagcaccgacaggcgcttgagatctacgtcttcaaacttgcggaccacgagaaagcggaagagtgagtgatatgtgacttcaccaagagcaacaattgctaacaccagaaagatactgcaaccaggtccatctcgccgaaaaggccgaagaagagaattccatctatctcaccctcctttccctctatctcaccccaccccacggctatgagccccaaaacgaccccgcgattgaactgctagccaaacacggctcacgcctcccagccgacgccgcattgaaactcatcccggacaaacaggccgtggagaaacttgaattctatttcaagggccgcatgcgcgccgcaaactcaattttcaatgaagcgcgcatcgtggcaaacctgcgcaaggcacgggatatgcagatccaagcccagctcgctctcggtgagggaattcgtggtggaggcacgcgggctcgccacgtcactgtcaccgaggagcgaatttgcggcgtctgccataagcgtttgggtgggagtgtgatcaatgttttccccgagtaagtcgttttcagtcatttgcttttggtttgttcgtcgctgacttgttttccagtgatacggtggttcacttggggtgtgccaatcgaagacccagtgttcgagttgggtagtatgtttgctctctgcatctgcattcgcgaggtcggtgttgtgctcgttcttgttcatggtcgtcatgtcatgtccgttattttatttttattttttgttctccagatcaagcttctctgttcatttggtttgtttggtcgatggagactatcccagcgactttgatacccatagcatctgcccatttcaagatacatccggtcatgcaaatcatgcatcgtcctcaacaacctcctctccgtaattttcctcctcctgagcttcctgtgctgagatctggccctgcactttgtcctcttccatgcgctccgtaaggaagacgttgatctgctcctgcagcttgggcacgagcgactgcagcgctgagaggtgggcttgcttagccgctaatgtgccggttgtggttgatatcacatgctcaaaggtctcagtggcatgaggggcggtgtagactgcagtcaagctcgtgttggaggccatttgaaatttaacagggaagttggggaaattgttggccctggagggggagatggcagagaataatgtcccaagctatcctaccgcctttcttaccgccttttcgctgatctaagcccgacctcgggacttggcactgcttccccagggtctcagggtcccagtccttcaggtacggctgaatacgaagttatgtattactcgaggtacttcgtggaccatacggtagcattgccgaggctaatatctgttgggttctgttcaggcagtaatccctagtctgtatccggcctggatgcatactagtaagaaatttgtggaaattggaaaaaggaatacaagtgcaagggatgacatcaagcagttaactggtctacaaatataaatcgcaaggctataaactccgttgaatctagatcaaagcttagccaagtctccgcatctttcgtcgatctgagattctgccagataaaggtagaggaagggatcggcgactgcccagatgtggcttttgtaacgttgtaaacaaaaaacttcgctgaaagataacctgcctgaaagagacaaagacagagagagcatgggatattcattatgaatcctaccttccgatccccgaactcgcctgggcgtcaagtacctcctgcccctcgctacccccgacctccatctgatgacgaagaggaagacgactccgatgaggacgaattggttcaccccggatcctccggtagtgacgcttcttccaatgtgacaaccgtttccgccgctcctctcacgccgatcaatactcaacagtccgggggttacttccccccacaaccacgatcggccacttcacctcatcaccctatgccaaacccaacagctcgacggccctccggcccgggggccccccccccgcnnnnnnnnnnnnnnnnnnnnnnnnnnnnnnnnnnnnnnnnnnnnnnnnnnnnnnnnnnnnnnnnnnnnnnnnnnnnnnnnnnnnnnnnnnnnnnnnnnnnnnnnnnnnnnnnnnnnnnnnnnnnnnnnnnnnnnnnnnnnnnnnnnnnnnnccctccgtcgggctaccccggcaccgatcacggcaccactcacaggggttcttcgagccttccctgccgaccgcctcctccgaccagctccctaccgtgtcagcatcccgtatcgccgcccaggcagcaatgcagcagacaaaaaggcaacaaaatgtgatgcccccgatagaggatggttctcgtcccaggcgcagtggaagcggctcgcctcctctcatacccgctccgttgcgtgtcaaccaaccctccccgcaaccccctccgccactagggaatgtggccacggcagctgcgaatgtggtcttcccgcgagccggtgctgcgccggtagaaccacagcccgagaaacagaagaagaagaaactcttctcaaaaccaaaacatatcggaatcagcagtcataaagatgtgagcaaagaccgtggtcttccctctccgagcaagatcagcgggttatcgcgcatggtcagcggctcggctacgaatttgaccgacctgtcctcgaacaactcgatgtataatctatccaatgcctccgtgaacactgtggtccccgcagatcgtccgccgcttccagagaaggaaaaggataaagacaagcataagcatcatttcctatcgaggcagaaactcaaactaaaagatcgcgtcgaagaccacttcaacctccctctatcatcggcttcgagtaattcccgtccggcagacccaaatgccccacaatctttatattcctttactcctgcgtctccagctcctggtgcgacatttggcaagtcggtcagtgggttagatctcctgcatggtggtcgagcgctgcgtgagaagaaaaaggaggaaaaggcgctcgccgagtcggagcagatggaatggctggccaataatactggcggtcctacgccacctggcggcttcccaggtccgtcttcagttggtagttcggggacattccctgagtctattcttcgggagaccttgcaagggtttgggttgaataatatgaccccagaggatgcgtgggacttccttaaggcgaagctgctggtcatcttcgatggcgaagacgtgcgcattgccattgaagatctcaacaagctagtgctcgttcatttgcagcgttgcgtggttaagagggctcctgcgtctattgtaacggacttgcaagaactcttgcagactggatttgcgactttgaatcacagttcgctgattggcctcccagatgaaaggttgatcccgcatctggtccaggtgtggctgctggtgtttggcacaattctgccattcattcaggctgtgtttcttcccttggatctcgagttcaagggctgtggacccttgatgactagccgagaagccggtgaattctggggtgcactgcctttcggcggaacactcgatgtgcgaagtctggtcctgattgccttccgtgactgcatgatcctgaatcgctacgatgcccttaaagcaaccttctcccggctcagcctggactccatcaacaccggattcccgacactcagcgtcacaactaagagtaccggcactggaggccgccctggtactgcagcctcgctcgatgccggcttcggtagttacaactcgcagtcatccacgcttctcagcaccgtcgacagttactcctccgacggcattagcgccatgaccagccacccacgtccaacgagcagtgactctcgcagtcgcgccgcctcaaacacatcttccaacgcagatcccctcttcttccagtccatcgcatcacctccaacctctaacaaacggcctaccatcatccaccgcggccccactgactcctcccacgtcatcacagagaccgtcggccgcatgctgcaatgcatcagcgtccttgccagtgtgcaaacgggcgacgctgcccaggagcggatcgagattctgagcaaatctctcaaacacaactggcttggtcgcggccgcacaggccgtgatcgtcgtggctttgtcggtgccaagatccggcctgtaatggtcggcggtcctcctgttattgatgatggagattccctcacgacggctggcattagcatcggtgcgagtactagtacagggggatcccggggccgaggtgactcgtcctcctcagaatggagttccaatgtcccagggcccgccatgagtgtgcgtggtggtgttagacgagaattgagtgttctatagctttgtgtgttttcttctagctactcgttacgattgtatgtatgacggcgggtgggtaccttttggcaaggggcgtttctgttttataaaggaattgatatcctcgggcattgcccagcaatttcatctacgaatcatatactaagcatatgccaaccggcaagtaccgccccggaggatgatagtaagatacaagaagggccattgggccctacctttatgataggagatgcagaggccaataagatcggagaatcgatcctctactacgtagtcgacctagatataaactacgatactattctactctgtagggaattgtgtgaatcgtacaatttttcttttttttttggttttttttttggggttttttttttgggttttttttttttttttgaatccaacagtactccgacaagtcagttgtcgatacgtacccagggctcggccaactagccactgggtaacattcacaattcaacagaggggatggcgtctcaccacgccatcccctcaaacaatcaagagagagggcttactcccgagccctcccctttcccttgacatcgaccttaccagcctccttgaggtcctggtaacggtaccggcaggcagtggagagaaccttccagccaatctgctccgaaacatgctgagcgatgagcacaaagtgcccatcattcagcagctgcgagccaaattgctgcaaggcctccagaatagccgcctattgaatagaatagttaacaaccagatcaactgagattgaggtcagagaaagggtaaagtgaatacttacgtcgaaaccaggccagggaccaagcttatccacgatccgtccccagcgcctggtcactgcccgccatgtcatctcgtcctcccattcaaatcgattcgcgttccacgcctccgcgacctcgctccaccttaccgcaggattcccctgcttcatctgggacatcatcttgtcccctttcgatgcttcctcccatgacgccggcggcttgttgccccgccttcttcgtttggaggcgggttgctgggcgccggagggttgagggggcccgggaactgctgtttcggtctgagagttagtactagaatgaggattggatgatcctgatgcatacgaaagctttgacttattcgcgggacggcgacttgtcgaagccgacgtggaaggaccagactcagtcttggtcttagtctcagtcttgttcctaatcgaagtgcggcgtgttgcggtcgacgcaggtgggggcatctcaatctcaggcttgaccgtggccttgagcgaggcgtggcgtgttttgatagacgcaggctggggggtctcggtatcaatctcggcagtcgtcttcggcgaggcgctgggttgctgtaccgaagcggaggttcgggctgagacggaggttgagggcaccggagtcgagctcttctttttggttgcacggcgtcgggcacgctttgcgggtctgtttgatgttggggatgcttcctccactgacggcaatgtctcttcagcagatttagcacgtttttcagacttaggtgtatcagcttgagatgggccaggcagatcgcgggccttgtcagccagctcgcggtccatggcagcccatttgaggtccatcgcagctcgttcgcggtccatgtcagctagctcgcgctcattggcatcccaagccgacatggcctccatggcagcccgttcgcgggtcatgaaaggcggattgagggccatggcagcccgttggcgggttatttcaggcagatgatcgcgggtcatgtcagccatatcgcgggccgtagcagctcgttggcggtccatgccagccagaacgcggtccatgtcagccagagtcaggtctacggcgggcagatcgggggccatggcagcccgttggcgggtcgcttcaggcagatcgcgggccatttcagccagagagaggtccatgtcagccataatgcggtccagggcagctcgttcgcgggctatgtcagctggttcgtggtcaatggtagcaccaggcagatcgcgggccatgccagctagctcgcgctcattggcatcccaagccgccatggcctccatggcatcccgttcgcgggccatgttgcggtccatggtagcccgttcgcgggccatgttgcggtccctggcagcctgttcgcgggccatgtcagccagctcgcggtcaatggcagacccaggcagatcgcggtccatggcaatctgttcgcgggccatgtcaaccagatcgcggtcaatggcagcccgatcgcggtcactggtagcccgatctgtagtgtgtaagaaatcgaagtctaggtttgcagtggcagacttcagatcagcaaagagactgtcagtatcctgattgttcagcttttccagctcttcttgtatgcgctcttgttggaggtgctcattgtccaggatgtcttggtagatttcattcttatcctttttccatctgggatctccaccagcatctaagttcaggagctcctgctcatccgcgagaacgcgttcgtactgttcagtagataagatgcccatggggtcagtggtccagctgttatcgggagtcctttgggggtaagtgtagtgggacgggagcacatttggatcttcgaataggccatcatatgctggtggacgttcgaatctgtcaactccatattctactggacggtaaggctgataatcattcaagtaaggatcaaagaatggagccatggggtcatccatgtcaatggaaggatccaagtaaggatttgcatcgtcccggggtggcgagggcacgaaatcgaggtagccagtgtagtaggaaggatcctcatagttggtaggaggcaatggtgaatcggggatatcatccaaagtaagctcgatgccagtgggatcgatgccagtaggatcgatgccagtcgactcatgagatgtgccctcatcaccagattcaggaagatccatgatggactcaaggatgaaaggtaatgtggtaagtaggtttcagctgatcaaagtcaatattggatgcttggtttggtttgatagaggatgaaagataatcactgttgatggagttggatggaacagtcgagtgagtggggtccaagatggactaacgaggactgtgattgaaggtgcctcgacagaaagagaggcaagactcaggtcctgagagtgtccttgtacaatgtcagagtcttgggaagcaaaagaagaagtggagtgttgcaaaggacaagaaggaatggggtgttggaaagcacaagaagaagtggactcttgggagtcctcacgaggtctgttgttttgaaaatgaatcttactttagaagtggcagtgggagtcgcgtcctgaacgcgttggcagaatctcacgagagatatcgcgagaagacacaactgtcctcagtgatgaacttgggaggtctcttgatatgaagcagatagagagaagtgttctccttcgaattggacaggagcaaggttgatcaagtgcagattgagaatgttaacagagtcagagttggtgcgaggagaaagatgagtggtgcgaaagagacaatgtaaacaattagacgagggggctaatcgacgtattaagcacaacctcgacgtattaagtgcaaacagcaggactctgtttgagtgattgggccacctgaggtgtctgattcaatcgatggtgtgcctcttgtttcctagccaactagaccactagcacaggggaaagatatcttctagttctgtccattgtgtcaatcttaagagagatgaggtcgtctcgaagttcagcaccagagaactattcatgccatcaggagcattcgatgtaaatgatcaaccaatggtcactttcctaattaggcttatagaggctctgatcagccctatagcttctagcttccctagaagttactacagttactttactagtaagctgtctagcaagtctccgtgtctatcgccgtgtcgaaggtgttggtagttgaagaacagggtaaacattgaatttatattccccgtcaacctcttagtgtgacgtccaagtagcctacctcgacatgctcgatctttatatatatctcgactttatagtggatacactataccatattgacctatcatatttgatacttcgatttgattggatcactttgctctgaagatcggattgatattcataccttgctaatactaagaccattaacttagtgctttagggtgacacagggatattcaccaagtcagtgatgcctttgtctagagccatgcaataatgtctcccatagctctaggactattctacttctgagtcatatctagtaatgacccccattatacagctgttcagccttggcgcttaatatcaacagcggattcgccagggtttagggctaaagaaaaagtaaaacagattgcaagacagttaggcctccaaactgggcagttgaataataagtacaccgtatattgacaagaatagaccgacagaaattcgtggggccgactgattggcttcagggctgcaggctgcacagcctgcgcatcgtgatgcgtcgtgatgcgtcgtgatgcgttcctttcacataaaatgcgtctcacccacagcgccattctctttcttctctgcatttttgtctttctcttttcttcttcgtttttccgtatttttgctatttaatccatctattttccctttatattgtccaacttgggttaaatctccaactctccaactctctatctccaactccccggcttacggcccacagctcacagcttccagcttccagcctaccggactgggctgtcatggatacatcttctaccccagctgaggccaaagatgaagttgttccatcagagaacgtgaacggctctgcccagtctacagaaaccaaagaagtcaaagacgctgctgccgcccccgcacccgagacagcccctgcgtccacccccaaagtgtgcaaaaataaaaaacacaaaaagaagaataagcaaaaggaagagagtgacagctcctctgagtcttcttcttcgtctgaatccgacagcgatgccgattctgaatccgactccactgagagcgacgccgataccgagaagcgcaagcggcatcgactacgaaaggcgcgtgcgcgacgtgcgaccaaggataagaaacgtcgcaagaagaagaagcaacaacggtcgcgcaaggctgaggcatcggattcggaatctgactcttcctcggaggcagactcggagtcttctacggactccgatgatgagatagatgacaaggcgttgcgaaaattggtcgccaagctcaagcttagcaaaaagcgagctaagaagctgcgggaactggcttctgaagagttagccgcgagcgattctgtgggcgaagctcgccgcgagaagcggtctaagaagaagaagcccgcttccaaggtggcctacaagcgtgtagatcaatgtgagtttctcttcttctttcttcgtcttgcttgtctctcatgcttggaattttcgttgctgacttgttacagtatgggacaacaccatttaccagtacaagctcactgaaactgtggatgaccccgatgccgacgagtgggaccagtatattttcaacatccgtcgcaagttcaactgggagaacaagtatctcgagactgtcgtcgatatcaaaagcaaaccccttcgcgatgccctttccaagatcatggatggtgtcaagggcgtcagtcttgtgcaggagcccgccgtcgtcgatcccaacatgttgttcctgtatctggaagaaacaaggcagtacatgaagagcttgaagaagcagtcgcgcagcgagaagaagaagaaaaccagaaaagctgccgccgtcaaagctgcgcatctgaaggttctcgtcaaatacctcgacaccgactacgcagacatcaagaagaccctatacccactgctcgaggccaacacgatcaccttcgatctgctgtgggccctgtacaagcccaacaccatcgcttacaccccgacctacggcagcacagatgagccacgtgctttcaaaatcgagtacgctgtcaaagagtcctctttcgtgaagggtcagtggtacagtgtcgatggtcgttacctcgagtacgacggcaaggactacggcttcggcactatgtccgctgaagtcgacgccttcaaaggcgcccgcaagatcaccagtctcagctgctatccactgaagtaccaccgcgacgctgaggctctgcgtgcccgtctcgtcgaacgcggcaaacgcttcgtctccctccgtggcatgaactaccgcttccacaaaggcatggccttctacaagaaaaagcgctctctcatcatcaaggtcaatatcaatggccgtgtcatgatcgacccggctatccaccgtcgcatcaaccctaactataccatctccactgtccgtcccaaagatccggatctaatagatcctaaagaacttggagtcagcgacgacgagggtgattatagcgacggctgctgctgtggcggatcagactcggactctgagcatggcggtaactctgatgctccacggatgatgtacaaggtcgttgaggataaagatggatgtgcacgtgtcgttgaggtcgaagtcgacgagaacggcactgaggtccagaaggagaagatggaccgcattgaaggtgccacagataccaaggagcgcgagttcaccgaagaggagcttcttattgcctctcctgtggttctgggcttcgccttcagcgagaagctctggcttgaattcaccatctccggtatcagcgatatcgggtgggataaggaagccttcggctcgcttgtcctcccgtcgaaccaaaaatccatcgtcaaggccctcgtcgagtcgcatgccttccacgccgcgcagaacatcgacgacgtcatccagggcaagggcaagggtctcgttgccgtgctgcatggtccgcccggcacgggtaagaccctgacggcagagggcatcgccgagctactccgtcgcccgctgtatatggtcagcgccggcgaactgggtactgacccgcggacgcttgaggcggagctgaacaagatcctggatatcgcgcactcctggggcgcggtgctcctcctcgacgaggcagatgttttcctcgagaagcgcacgatccacgatatccaccgcaatgcccttgtcagcatcttcctccgtctgctagagtacttccagggcattctgttcttgaccaccaaccgcgtcgagacctttgacgatgccttccagtcgcgcatccatgtcgccttgcgctatggcgatctaactgtcaaggcgaagaggagtatctggaagatgttcatagagcgggtccgcgctatcgatggcgtgcatattgcttctttctccgaagaggactacgacatgctttccaggcacacgctgaatgggcgacaggtatgttttactgttctatttcttctctctatacaaatacaaactaaccaaactattccatcagattaaaaactccgtccgcaccgcacaagccctggccgtcaacgagcaagcgcctctgtccatggatcatatcaagagtgtgctcgaagtggccgagacattcgatcaagacctgcgcggcggaacgggatacctagacgccatgcggagctatacttgatttgatttgattatttccgaatatcttgggcaatttggatgcttactatgaatatcgttgcggatctagtattcagctcgctggttgcttttgcttttgttgcttttcgtatctgcttgctggtttcggttcatctcgggtacagagtattcaggtacgacgtcgcttcttctggcatggacatggggcgaatgagtttaggtagcttgaatacaacatcggtcaaaaatgggtttcggtacaagtcgggatcgtaggatacaccgatctatagattataatggattatcaatctagtgaagaacgttgtcatacactttcattattacaaaaacaaaagtcacgacgggacatggctagtggtacatggaatttttcaagggttagccttgacgaagtcaacacccttcttgatgttcttcttcaagtcaaccagggaggcatcgaggagaccctgctcgtactcgttgaccttgccaacggggaggatctgctcaacaccgttggggccgagctcaacgcgggaagcgaagaagtcaacaccctggtccttgtacagaggggagtcgacgaaggtgggctcgatgacacccttctcgccctgagcggcgcggaggagagactcggcgaagcgggcaccggccatggccatggagagggtggcggaaccggcaccgtccttagcctggacaacctcgtcaccaccgaactggatgcgcttgacaagggcgtcgcggacctcgccggagatggaggggtggctagactgcgaaagcagggggacgatggtcacaccggagtggccaccaacgacggtgacggcctcattggcggggttggtcttctcaacctgggagatgaagcgcgaagaacggacgacatcaagggtggtgataccgaacagacgcttggggtcgtagacgttgcgggccttgtagacctcggcaacgatggggacggtggagttgaccttgtgaatgacgcgtggttagtggggcctcgaattgtggagcgataattgcgacttacggggttggcgatgacaaggaccagggccttgggggcggcctcagcggcggccttggcgaggtcgcggacaatggaggcgttggtgttgaagagatcatcacgggtcatgccgggcttgcggggaacaccagcggggatgaggatgatctcggatccctcgaggcagtccttgagaccggtaccctcgggcttgtagccggtaacagtgctgttggtgttgatgtggctcaaatcagcagcgacacctaaataaagtcagtaattgcttttgctgaacgaattggatcattcataccgggagcaccgcggatatcgtagagagcgagctgggaaacacgggggttgagcttcagcagcagcgagagaggctggccaataccaccggcagcgccgagaacggcgaccttggaggcctgcgcgaagagttaggtttaattctggggaagacagatgaatagaaacgcacattgaaagcggaggccgagaaggcacgcttctggaagaggttgacagtacgacgagcagcaaacatgatggatgattgagggatgtggatgtgagaagggaagaagttgagggaaggaggagattccggtgaaagagatgggattggcttggctccacaacaggttccgagctcccgatggctcggctgagctctgcttctcttacttcgactaatctgctattttgggatttcctaacagcaattgtgacgttctggggtttattattggctagctgggcttaaaatctctctaggatcaaaataatacctcatttccatgctaaaaggcttatgtcccattctcggagcaatggatgtcagctctgcatgtggtaatcgcatcatcctgtcaagcgaggtaattaatttcgtgtgcttaacgtaggaagaattgtttccaatcgatatatttagcttagagatatatatccagtgagtcttaaggagctacaatgccttagaaccctagagaagagactagcctatagttagttgtatagttatgcaattgaaggtccaggtgtccacgggtgagtggtatactgtcacgacgtcataggcccagaagttcccgttcgacccaatgcggaagtacactgaaataatcaataccttgtgtactagaaggaatataatggattactttactaaatagcaagtcctataggtataatcgcatactcggaaatagctggtgatggtccatagtgaagttgaacctagcgcaacctactccgtagcatatatatacattacaacccacactccgaaacataactaacacttgtcggcaacaaggacctcaattacaaagaccaaacgccggcgctaatgaacccaataagcccaatacaagatacaagatcatgtcctacccaggtaaaccccgagaaccttcgccagctcccaactatacccagacagagaccaagactacatagtgatataaccctaccgcaagaagtgtagcactgcccagcagaacaaaaagaaaattaccacaccaccccagaaaatccacttatcctggcgcgcccgccgctccaccatccggatcgtatcgccgctaacaccaagcgtgttcgcaacgctgtatagtcgccgctgagttcccttgagtacttcgcgctgctgtcctagatcagcgaggaccgctcttccgcggtctaggaaatcatcgagttgattgtgtgtgttggagaagaaggactgctcgcgtagcgcgtgggtttcgcggtcgtagtcggcggggccagcgccaaagccgagaccggatgatgagggtgcgaaggctgaggtgctctgcgggagtgaagattgcgcataagggttctctggtgttgcggcgtggtgtggacgacggcctagaagttcattgtggttggtgaccgattgctggtatgaggtcagtattggagtatctcatgacaggattgatgtatacatactgcatcttcgcgttctttgcggagtcgatcgaattgtacccgatagtccgcgagctcacttcggaagttcttgacgcggtcgaacgccttttgttgtttctccggaattagttccttcttggagagtgcggagtagtcatcgacggtgcgggaaagcgatgccaaggaagcagcaagctggcctagaagctagaagtcaatatcttaggttgcgaagagtcggtggtaggagcgcaccttgtagcgcgggtgaggaggtggttggcgactgtgaaaatgtatccagatcacggcggatcgacgatgattgctttaaagcagagttgaatagcgagttctgttcatgttagctgtgtaaacctatcgcgaggaactgcaatatacataccatgttgtcaatgcgccgtatagattagacttttagattgcttcaatacccagtaagtcgtggaaagaggagtattaggactgctagtaagctaattaagagatgataagctcccgagctcaaacaccaaggtcatcatctgatcccaccggaggccagatggtcttgtttgggcccattctgacgtggttcaccgccttcaggtacaatacattgggatatttttagatgcataaaccaggcgatctttgaatcacaacgtacttgattgaggaagatgtcgccaagttatgattgggtttaatgacttgaccggcacctaagggggagattgcgttttatctcctttattcccaaattcgaggatttctatcagctaagttgttgaggtttaaattgaagaagtcttgcaaaggtcaccataacgcctcgttttagatttccaagcagggggataacaagtcccaactgtagagaaatagaaacaaatttggcaaaaagaatcgggtagagatcgctggctcgagcctataccttctccgcaatatcttccatatcgttttcagtgagaacaaaatcagcctccctgccctttttatcgcgaagaaagatgtcgtggaatggtagcgttaactgtcccatgactccaggagagtttggccctgggttccgttcaatctcactcttttgtgcgctgctgagaaccgaaggtccatgctgctaccaggcagtaggtttgttgcccacggttcgacagtaattcggcctcgactaagaatgtgaattgtaatcgcggtcttaatttgaccgttagagtctttgaaccaaaattcgatggctgaggctttaacacgtttgagagcacgcgactttgccgacaaatgttggctacttggcggatcttccagctggcggaaagtatggcgtccaggtaatatctgctctcctagttattgccccactgcggacaattcttgtattggaaggcattaagggttttatctcttaacacctccagctactgtggcacactgtgccatagtatccattatctagttatggatcacatggtcgattagtcatcctacactggaatcccccaccactaggtagactctgcgagtagctcaacttcgaatatctacacgtcgtacttgctaggaagacactacattttgtcatattctacaactgctagaacttgaaaggaaaatgatatcgttgttaaggtactggtacagtcaatccgatccgactcctttcgccaaatgagaatgcaagaccacagaagagctgggatggtatatcaagataaaagcaattaggcaacaccaaaaagacgaacgccatacatctatttgggagggaacttgttctgcaagaaccatctagaccatagattagcatcatgccacacccatcagtccgaaaatatatgctgtacttacttgctgacgaagtagtccacggtaccaaagattccaacagcaccggcagagagaccaaccagctcccaggagaggttgccgcgcgcgtgttgcttgtaggcaccgaagccgaggcctgcaccgaccagggttgcgatagcggcattggcaatgaagacagggttgctggtgtttccacagaggctactgctcttcaccttgtgggtcttggccttcttcttttcctcgtcctcgcgcttcttctcatcggcttcccgctctatccgctccgcctgggtggtggtttgaacatcttgctcaaggaagtcggactccacagtctgcacatgggggctatcaacgtcgatcaacgaagctgtgctctcggattcatcgtggtagactccgcccaccgggggagcacggctggagtatatgttagttttgtgcatggagaattgatatcgtgaataacttacgcctgttatttgttagcactgtaatttttgaagtttttgaatttagatatgagtttgaatacttacatcttcgggggactgcttggggcccttggcggctgcgtcggcgtaagacatgatgttgttcgtgatggtaggtaatggttctgtggaaattctagtcaacaactaaaacacctcaaggtctagaacgaaaatgtaaacttactggaaaacgtgatatgggaagggaggagtccgagggggaaaggaaggatttatacccaggaagctggggggtgatgacatcacgtcattgacctgggcccactaccaaggttccgtgggctgttgatctcataatagctatacactagtagtactagcagtacacaaatgaacctgaagataatttacgtccactcttctaatgaaggcttaattcaaataataactcgattagatattacggtcattagaatcttgacttgacctcggaaggcgttatcaggcacaacaacttcaccaaaacacaaagatgatgcagaagaagtcgagaaaaatttcattgggagaatttaaagctgctaaagagatcaaagacaaatgggacctatgtaatggtctaatgagggaggcaaggtgttttaatacagattacatataagtcagaacaagagagcttcgctgtctacagaagaagctccagagggttctcgacgaccttcttcagctccttgatccattcaccaccaacggcgccgtcaaccaccttgtggtcgaagctaccggtcacgacgatctggtcgtcccactcggtaacggtgccctcctcggtctcgacggggatagcgaccttgcgggtggtgccaacagccaggataccggcctgtggggggttgatgactgcggtgaagcgctcgacagcggggttcatgcccatgttggagatggtgaaagtgccgccctggtactcctcgggcttgagcttgttatcgcgggcacgcttgccaagatccttgatctgcttggagatgctggagagtccgagaccctgaacgttcttgacaacgggggtaatcaaaccagagggggtagacacagcgacgctgatgtcaacggtgttgtgctgacggatgatggcctggccgttctcctcgcgccagctggagttaacctgcgggaccttcagaagggcagcagcgcatgccttgaccaagaagtcgttgacagaaagcttgtactgaccctcagcggaagcgttcagagcctggcgaagcttcaggagcttagtaacggagagagtggtggagacgaagtagtgagggttctcggccacggactgcttcagacggttggcaatggtcttgcgcatcgagctgacggggatatcctcgaaggaggcctcgctggaagcactagtggtgctgggcttggccttctcaacatcctccttggtgatgacaccaccacgaccggtacccttaaggcccttgatggatatgcccttctcgagggccaaggccttagcggcagggctgagagagggctcacgatcaatgctgggctggagcttctcatctgaagtctcgggctctagtgcggcgggtgcctcctgagctggggacggggctgagggctcagcgctcttgggctgctccttgtgctgctcaccgagatcaggcttgtcaccaccggcatcggctgtggtaaaagactcgaaggcggagatgtcggcaccctcctcaacaaggacggcaataggctatagggaagacaagttagattgatgaaacgaccctcagagaaactgggtaatttcttaccgagccaacagcgacatccttctcgccgctctccttcaggaccttggctaggataccctcatcctggaactcaaaatccatctgtgccttgtctgtttcaatctctaccaggacatcaccgggctggagggcatctccggccttcttctgccacacgccgatgtttccagcggtcattgttggcgaaagtgccggcatggtgatgattgtgtggggagggaaagctatagacagacatattagaattggtgtgttggagaaagagataagtcaattgtcatacacttggaggcatagaagcgggaaaggccagagagcgcaggcacttgggtcctggtggaaacatcattagtatcaacccacaatcataattattaattagtggaacataccgaatcgcctcctggagcttggaggagacctggggccggcgcatagcaacggcacctctggacatgaacatggcgcccggggtgcgcatccgaatagctgacgcaaccatggtgcctgagacttgttgcgattataaaaagaaaggattaaaggcccttgacgctgatatgaagaaattgaaagagcccggtacagagaaacgtgaagggccaagaatggatgaggttggggtagaaggagatgcctctaaatcacgaacttttctgttgagctacctatggctcccggtgagaggagcggcagcggcctcttccgatatagtcacgtgctgtaatttacagtctcaagctctggctatgtacataatattctgccagcaatatagctctacgccagttataattgattataaacaagcggtaaacccctctcagaaggcggtataaacaagggtcaacacttttgcttagtcaccgtattggttatccacggattgtttttttgggggccaatgcctttcctaccgcattaggtatacacctatgttgtaagaagaatgttggaaaacattcaaaagcatgtgagatcgaggaattaccaagctggaggtagttcttgtgatagttatcatttttactagcaatatagatgtactatcgtacagggtacatgcctatgtagtacagtacttagttacatacatatagtgtttaccccgtactccgtacagaaccagacgatcaacattctgccaggcaaaaaaggccggtgaggacctttggaatctccggctccagccaatccttagatgaggtaagcatgcattagtcccgattcggagaagacacgcagcccccgtccttacatggtcatcgcaattgtttcaagcttcgccacgtttactcgttcgatgtttttgatctaattagatcactccgcccggagtcaccctgactatggcggacaccgaagtcggctcagagccgacccaatccattgcaatgcctgagaaatccgtcgagacccccgacacatcttctacagtaccaaactccgacgagccaacactgcccgagcagaccgaatcggaagaaccaaaccaggagagcgacgagggagtagccgaggtccaggaagatgaagaaaaatcagaggtcccgtctaagcacgagcctgaacaaactgaacaagaaccgcaaacagacggtccgcctacgatccaggaacccccccacgaggacaacactgcgacagaaagcagatggcgatcggattcgcggtcaacaacggctacgtttatgacgcagcgatctagcccagtcagctcgacggtctttattgtgacggctctggacaatatcgctgcttcgcgggacgcccggagggacaaaaagctggaggatgccacacaggtggctctggccaatatcagacaacctgatgggcaagccattgatccggagcttatcttccgtcctctacacctggcaagcaaagccctgagcattcctctacaagtgactgcattggactgcattggaaagctgatcacatactcctatttcgcgtttccatctgccgcgacagacaacaatgccacgcgcgaacaacctcctcttattgagcgtgctattgatgcgatctgcgaatgcttcgagaatgaagcaacggccgttgagatccaacagcagatcatcaaatcgctattggcagcggtcttgaacgacaagatcgtggtgcatggagctggtctcctgaaagccgtccgccaaatctataacatctttatctactccaaatccagtcaaaaccagcagatcgctcaggggtcgctcacacaaatggtcagcacggtctttgatcgcgtgcggacacggatggatcttaaagagctccgagtgcgagagctagaaaatccatcctcgacccttgatacatcggcgagtgacgtgggccaaaactcggagacggctgatcagcccgtcattaaagagcccactgctgagaagctcaccctacagagttttgagtcgcctaacgaggttaccactgtcaacgataatgcgccgactacagtcacgcgtgctaagcggtcaacgacgaggtcaatgtcgggtatccccgaggaaaaagatgatgatagctcggccgaggacgatgtggacgagatttacgtcaaggatgcttttttggtcttccgagcgctctgcaaattgagccacaaggttctgactcacgagcagcaacaagatgtcaaatcccagaacatgaggtcgaagctactttcactgcacttgattcactacctcatcaacaaccacaccgcaacctttctatcccctctggcagcaatcaagaacagctcatccagcgtggatggaatgaatctcctgctagctgtacgacctcatttgtgtctaagtttaagtcgcaatggttctagcgctgtgcctcatgtcttcaaagtctgttgtgaaatcttctggctgatgttgaaggacatgagagtcatgatgaaaaaggaactcgaggtgttcttgaaagaaatttatctcgccattctcgagaagcgcggggctcctacgttccaaaagcagtacttcatggagattctggcgaggctaggtggtgatccacgggctctggttgaaatctatctcaactacgactgtgacagaaccgctttggagaatatattccaaaagtatgctctactcaattcttgattttctttggcatggactaaccttcttagtatcattgagcaattgtcccggtactcaagcgtgccggttgtaacaacaccttcacagcagcatcagtaccaagaacaacacactaaaatgtcagccattggttctgaatggcaccatcgaggaaatcttcctccttccttgacaagtgcacacattgcccctactccgccgtcctcgatgcctcatattccaccggagtacggattgaaacagcagggtttggagtgtcttgtggagatactgcgctcactggacaactgggccacacatcgcatcgatgaactgcccgaggcagccattccctctaaatcgatagataactcccgtgagtccttggacacaagcgtgcttgtttcaccgcatctggagtccttcgagagtgggactggccggtccacacctatgcccgaagacgacccaaaccagattgaaaaagtcaagcaacgaaaaatcgctctcacaaatgccgtccaacaatttaatttcaagcccaagcgtggcatcaaggccttcctgaaagaaggtttcatcaaatccgagtctcccgaagaaattgccagcttcctacttcgcacagaccgtattgacaaggccatgctgggagagtatcttggtgagggagaccagcaaaacattgctatcatgcatgcttttgttgatttgatggaattcacgaagcgacgcttcgttgaatccctgcgctcgtttttgcagcatttccgcctccctggtgaagcccaaaagatcgatcggtttatgctgaagtttgccgaacggtatacaactcaaaaccccaatgccttcgctaacgctgacactgcatatgtgcttgcgtactcggtgattctcctcaacacagatcaacacagttcgaaaatgaagggccgccgtatgaccaaggaggactttatcaagaacaaccgcgggatcaatgacaaccaggatctaccggccgaatatcttgggaccatttatgaggagattggaagtaatgaaatcgtgctatacaccgagcaggaacatgccgccaacttcaaccctccacccccggctcccactggccttgcaaccagggctggacaggtgtttgcgactgttggacgagacatccagggtgagaaatacgcacaggcttctgaggaaatggcgaacaagacagaacagctctatcgttcccttattcgagcccagcgcaagacagcagttaaagatgcgctttcgcacttcattcccgcgacatcagatcgtcatgtcgggtcaatgttcaacgtcacatggatgtctttcctatctggtctgtctgcaccgatgcaagacacgtccaacctggaaaccatccggctctgcatggagggacttaaactgtccatccggattagctgtgccttcgacctagagactcctcgcgtggcctttgtgactgccttggcgaagttcactaacctcggaaacgtgagggagatgatggccaaaaatgtggaggcactgagagctttgctcgacatcgccttcaccgagggcaaccacctccagggctcgtggagggatgttttgacatgtgtcagtcaacttgatcggctccaactcttgagtgatggagtcgatgaggggtcgctgcctgatgtttcaagggcaccttcagcactttctaggacgccttcatcagcagatacctcccgcagatctacgcaaagtacacgacgccctcgccctcgctctgtgaatgggccaaccgctttccgcccagaaattgccatggagagccgttcggcagatatgattcgtggcgtggaccgtatctttaccaacactgctaatctgtcgcatgaggcaattattgacttcgttcgggccttgagcgaggtcagctggcaagaaatccaatcttccggtcacaccgattcgccccgaacctacagtctgcagaagctcgtcgagatcagctactacaacatgactcgggtcaggattgagtggtctaagatttgggatgttttgggccagcactttaatcaagttggctgccactctaataccatggttgtcttctttgccttggattcgctccggcaactttcgatgcgcttcttggagattgaggagttgcctggtttcaagttccaaaaggacttccttaagccttttgagcatgtgatggcaaacagcaccactgctgctgttaaggatatgattctgcggtgtctgatccagatgatccaggcccgtggcgacaatattcgttcgggatggaagactatgtttggtgtctttacggtcgcagcacgggaaccctatggtaagcctcgctgctcaaattaatccgtccctcgctaatgtatcaaacagagggaatcgtgaacatggcttttgaccatgtcacccaagtatacaataccagatttggcgtagtaatcacccaaggtgcctttgcagatctcatcgtatgcctgactgaattctcaaagaactccaagttccaaaagaaatcactgcaggcaattgagaccctcaggtctaccgtcaccaaaatgctacggactccagaatgtcccttgtcacaccgtggtgcttcggcggccatcttccaggacaatggaaccaatcttgctaaacaacttacccgtcaatcacaagaggagcagttctggtatccgattctcatcgcattccaggatgtactcatgacgggggatgatctcgaggtccgctcacgggcactcacatacctctttgatacgctaatccgtcatggtggcgatttccccagggacttttgggatgtcctttggagacagctcctctacccgatctttgttgtcctgcagtctaagtccgaaatgtccaaggttccgaaccacgaggatctttcagtctggctgtccacgacaatgatccaggcgctacggaacatgatcactttgttcacgcactatttcgatgcactggagtacatgctgagccgcttcttggaactgctgatattatgcatttgtcaagaaaatgacacgattgcacgaattggcagcaattgcctgcaacagctgattttgcagaatgttgcaaagttcaagccggagcactggtcccagattgttggggcattcgtggagcttttcagcaaaacgaccgcctacgaacttttcacggctgctgcatcgatatctaagccgacagaggcagttaatggggacctcacccaatctccagatgctgctgtagcaacaaaagagatgcctgatgcattgcagcctaacggatcccaaagcgcatcttctctccatgatcctcctgtccaaagtgaagcccgcgccgaattggaagactatcgccctcactcagaccagcagcaacctgcggctgtcactgcagctcggcgccgttacttcaaccgcatcatcacgaactgcgttctccagctgctcatgattgaaacggtccacgaacttttctcgaacgaaaatgtctatgcacagattcccagtggagagctcctgcggctcatggggctgctgaaaaagagttatcagttcgcgaagaagttcaacgaggataaggacttgcgaatgcaactctggcgccagggattcatgaagcaacctcctaatctattgaagcaggagagcggtagtgcctctacctacgtgcatatcctcttccgaatgtatcacgacgagcgagaggaaagacagagcagtcgcgcagagaccgaggctgcactcattccgtaagttcattatctaatattctctccttgttcattgctaatttcactagactctgcgcggatattattcgcagtttcgttcgccttgaagaggacacccagcaccgcaacatcgtcgcttggcgtccggttgtggtcgatgtcattgatggatatactaacttcccgcaagatgactttaataagcatattgaggccttttaccctctcggagttgagcttctgagccgtgatctcaatccggagattcgcgttgccctccagtctctactgcgccggaccggcgaggtccgactaggcattgctccgcccaatcccctagacgtccccatcagcccgcgcagctccgtctcccagaaagcctcgcgccgcgatagccaggtctgacttactgcatgatttttttggatatcctcgccgcgggcttgattttcggcgttctataacccgactcttcggggtcttgtgttgtcacacgagcattttgttctactttagatgcatacctgctgctgtattgataagataaaatatttcttgacttgttttcttatttattctgtacttcctctagagttgggatcttacccggctcgtaaaaggataatacaccgtccatgtccttttcagtcatccctacaagctcatcaaggctccatgtttcgcagactccagacatcctataattattagctcacacttctttttgaagaggattgcaactcaccatttcattctcttagggccttggtcaggattcggcgcaatctcacggagcttcctccgtagctttcccacattctcaatggctgcgcccgtgttcgccggcaatgtctccgcgatcttcttgcgcacaatactggctaatttgggcccgttgccatttgtgctgaccatgatctgcaatggcccatcgcggtgaatactcccaaaatagaaatcgcattcgggcgggacatcagcgatattggcggcaattcgcctctccttgcaaagtttccagacttgtgtcgaagcctctgggtcgtcaatggcacagagcaccatgtccacattatcgaggtcggatggctcaaaatttcgatcaacgtgtgtgacttgcttttctgccaccctgaaagccacttcttcatttagtccagcggctggacaaaccacagtgactcgggcatcggcattgagaacgttgagaatgcgccctgcagcaacctagcggagatatgtagatcagtcctcatcctttaaacgatagatacttgctatcatgtttgaccacgtacctctccacctcctacgactagtacatgcttgtttttaatttgccaagcgagtatcaatgaaccaccaccttgcacttctgggaactttgacatggtgggatgtgggaataatgatgcaactgtcccgtttatcggctccgataaagaaaaaccgcgtacggtgggcggtacacaccatccccgcattattcccgagcttttcccttctgaacttttttcttctttttttttttcatcctcctttcacgtcactcgtgtctttttcttaaattatgcggggcgtccagatattttcggggaattctcacccccgtctcgcagagactatctgcgagcgcttaggcactgtgcccgccaaagctaacctaggaaaatttgccaatggcgagaccagtgtcgagatcggtacctcagttcggaaccaggatgtttacatcattcaaagtggcagcgagaagattaacgatagtgttatggagctcctgattatgatctcagcgtgcaagggtggctcagcgaagtccattacaggtatgttgccgacgcctccagatacaaaagcttaccccactaactcgtttctctagcggtcatgccgtatgctgcccgtcctgtttgattccaatcacagacaatgctgactctcaaatgagatatttcccatactcgcgccaatctaagaagaagagtcatcgtggtgctatcacggcccgcatgctcgccaatctcctcacgatcgccggcgtggaccatgtgatcaccatggacctgcacgtatgtttctatgcgatgttgagttttgtaatatggatattgatgggctcctaggcatcccagatgcaaggattcttcggaaagccagtcgacaacctctttgccgaacccttcattgcccgctggctccgcatgaatgttccctcctggaaagacgctgtggtggttagcaagaatgctggcggaaccaagcgagtcacatcgctggctgatactctgaagctcaacttcggtatcgtgacgacagatcgtcgacgcacgaaggtccccgtggccactatgactgacagcacagtcttcttcgatgccgtggatgatgatcccatctcgagcaaggacgtacagcctttcgagcttcatatgcaaggttctaacagagcacctgccacacctcccattccggaagagccggagccaatcactcctcctcctgtgccatattttctgcgcccggaaaccccacctgcggctcgccgtctatcggagctggaagcagcatacgagtacacggacgtccgtgtgcgggatgttatcaccggtcgtctggtgcagggccatttggttgatgatgattatcgtatcagcgaagaattacagtctggcggcaccacaccgggagctggcagcagtaccaatgacaacttagaggctattcctgatgctatggttaactccataatctccaacatctcgtcgcagcctcctgatcatgccctcggtggctcctttgacgcagttgagtctgacgacgaagctagtgtctgcgagggccaggtcgatgaaaggaccatcacgctggtgggtgaggtgcgcgaccgagctgtcttccttgtcgatgacatgattgacaagagcggatcgtggatcgcggctgcagagaccgtcgtcaagcgcggtggagccaacaaggtttactgtattgccacccacggtctgttcggggagaactccttagatcagatggaagcttgtcgctcaatcgaccacattgtcgtgaccaacacgttcccgatctcaccgttgatgttgcggagatcaaaaaagttgattgttattgatgtctcgagtctattggcagagagcatccggagacaccattatggcgaaaggtttgttttcaccgaccctggtgtcgtgtgaccatccactaacaactagcagcgtctcggctctcttccaccttaacgactgatgaggcatatggcagtaacgaggaaaaataacgaaaccaagcaaagagagacctagatactttctctagggcgtcgtctttgcgtactgatatgcaggttcccctgcaaccgttgatgacatgatacctatttcctatcaaatgaacgacccgttctgaacctctcccccttcctcgttcccggactgtcctccccgttgccccctaccgttcccgacctcgtaatgtgatcatatcacacccctcaaaccagcgatgcagtccactctgggttctgcaggagcatctcgttttccacaaggtgttcttaacggagcgttggcagattaaaccggatcttgttttcttacttcatgttgtgtgctcttcggagtctacagcatggagaagtcacccctttctcagttcttcggaacgattgacctcgcggttgtggaagtggtgcaagaggcgatctcgaacataatgtaattcgatagcaaacaattcacacatttttcacattgggtcattggacacgttgacattttcaaaacttcccggttgagacggtagacctctggcagtgccgaggatttgctttccagcgattcttcccgattttcttgtcatgttgacttcatttccgtcgcaccgatgcggttggccgtgattctggaagccggttggtgattcggtcgtggtctggtgatcgccgagcccagagggtgtccactacgggagtgtcggtatctacggatggtacacggctttcaataagggattgtcggtgtgcacgtttccattgatcgaccgtgggacagttggatagagcttagttctcactttccaggcattccaggccacttggcgtgatcgattagtccagggtcgattctcatctcccgagcagatcttgaacggtcatggctggcctaatttgcaatctcaggtgtgacagatggacctaagatcactcaagcattccttgcaaacccatcggaagtgcagcctttgtctgttgagaccctgcccatgtccctttgtatagttgagtacccctttaagttggtagttgcagagaggactcgaccctagaaacctaccgttgtgtcaccccaattgggctcctctcggtcgttttggtattctgtgctcatttcatgctcttgtacacttgtacaatgagaaaaagaactggaactgccccatctagtcgctggagaagatcttggctagactgtggtagaattccccaaacaaatatgtggactcacggatgtgacagagatcacaatcctatacgagagactcaacaattccattttcttttctttgtttttttaattttaattttaattttcttccagggctttgcggctattcgataagcaattgggctaaggcaggcgccaaaccggcacactaatgccgccggggggtatatccctgtcacttgatgtgatcagctcgaaggcaaatggtcgaattggatggaatcgttctgaaactgagattgaaactgaagctaaaattgaaataccaatgacaagagggaaatccatgtggatctctgttaagcgaagttgatgtatcaacagttgaagattaggactttcagggggggatctcaaggataataaggtagatatgtcaaaagggcatagtaaatacaataggaagagataataggagatcataggaagatcatactctatgatgtggattatagccaaataaccatctatgtatgctaatgtgccctaatgtactccgtatatacgctaactagaatatgcattctcgatcggaaccggattgctgggatgcaaagatccgatcgaagagaagaaaaaagaaaaaccactagacttgccaattaaccaacatagaaacctccgttgtcagttcaatccagctcgtcgggacagaacatatctcgggtctatacaattcagctccacttcggatcatagtcggagtggacgacgatactagtcatctctatcatatttattgacttccaattaggttaattcccctttattctatattctgaaaacgccacactagtcccaactcttaaaaataattcaaactaacaagtcagtcgggtctcttccgtccccccagctttctcggaatcaccctttgcatcacgattcttccaatcatgtctccccgatccctccccatctggaggatcgaaggctgcatctatttgctaaactaggatctacctcgcttcgcctaagtttctatgtaagagattccaatatatctatccatttgtatccatttggatttctctctcatatactccgtaaataaacacccttctgtctgcttatttctttacccattctattaaatttgctttttctttcctttttttctgaggaactcaattgatcccggttacatgcgtcatcggctttgtgcgtatttcggctctttagttgtcgactggttgcatctgggatcctctcaccgtgatctctggacagaagtatataatgattgatttgtcctggatttcgagtctcatcttcttcatcccttgacccatcgacctcctcttccccgctgaactctgtcggaactctgctaagcccattctcctcttactatattccattggtgttcaatccaagtgcctggaacctttctccgctttttcagtgatcgacgcagttcccagtcccccgggttgtgcttagtctgtgagtcgcagattttgacaagcaaaagggaaccacaagctaactatgacagcttctccaagtctatatcaacatggccaaccaatgttccggccacgtctttgccattgtccaggctaccaatggcaacatcttgacctggcgctgttccgactgcaattctggaccatttgtggctatttggcgttgcaaaatctgtggtcattgccgctgcaatgcttgtcacaccaataagggataggcggaatctacggtaagatccttgttacaaattctatgatttgacattcttagctccttgcaagaggcttacttccttaaagagacgtctgcatttcccttctagcatttacaggactgatctgccattgatctcccactctgcatgaaccctgtgcaagggtagttttaccaccataatccctggtgttgggttttgattcaatccactttcttcgtggctcggttggcgtgtgtttatgcattttgatgtgttccaaaaagtccccaaaagtttttgatgcactgcatcttgcatccacaggagttatacttagagcttttctcttctttttttttcttttgtttctctgttttctcttcttctggccaatttgtattctacttggattttgatttcctcagggaaagtgtgacattattttatggattttatatcatgtcgtttatactacaattatgcaacctaacacggctactctaacacctcgatggggagtgtgttgggccagtcataggatgtactttatagcacctcgtgatccctgtctatctgaatgtagggtcctggtatccccatcgtactataaaaagcagagttcagggtttcgctttcggtttcgcacctgtggaaataaaagaaatagccaatagtgtttaccataaaaatattacactaaaaagtactagggataagtacaaaagtaccctgatattcattgccccgaaaaaagagtccattgctattcgaaggaatatttttccagccattcaagagctaatgagatgtatctcttttttggcggaattacggttcagtgaatccgcgcaaaagcaaagatactatggagtagataggaacaaataggaacaaatagagtcaaaatagagagaccaagggttcccagggaggtgggacaactctattacttctccacccgcgacgggccttttgggagatttgcatttacaaaagtactgcttagggcttctatagggttgggtgtgggatgtactgaatatgtactccgtactcttcttttattgcaaagatggatataattcgcattatctttaacaatgagaacagatcgatatatgtgaaaatgaatgcagatctcctccttcggcggactcaggtgtagatactctgtcgaacaattagcaaccacgcaatcataagaataagaacaaccaatcaaacctacctctgtaatctgattgacagccaacccaggctctgccatttcagcgtcgcgcaggaactccaacggcaaccaaacaagatgacccttgatgagatccagcttctcccgcacatccttggccggcatatacggatcgaacagatgtccctccttgtgcgtgccccgaggccggaaattgtcgtagtcctcgaaagtcttgatatgatcatcagggtccgcccggaacaacatccgatacgcctcggtgttcccggtcgcttgcgacgtccaggtgttccagaccgcatcgccgagcggatcgatcacgaactcgttctccgggccctcatcgatccggttgagtgacacatcgggaggttgcgcgttcgggtcgcccgaggcgtcgaattcttgtgccggcagtaggcctaggtgctcgcgccacagttgtcggcggagcgtggcggccaatcgggaggcctggtatggctgtccgttcatgcggctgtcgatgaggtcttggtcttccattacgatggccagttcgctgtcgtgcgagccaagctgggactgtggggagtggatattagctgatgatacagaccgggaaataaaaggaatggaatgcgtcagatgtgagagggatgcggtgctggtgtgtgtaacctacccggtcgttgatgttggcgctgccgcagatgatcgtacgatcgtcgacgatacacaccttgccgtgcacgtacagctcctcctggacgaagttcgccttttcggcctctgggtcgccctcccagacctcgttggacatcttacccccgttcaacatgctgcaatgcgatactgaatccttgctgtggaatccaccgtcgatctttccctcggcctttctcttctcgaccgtatcttggaaattctggagcttgcgcagggtttccttcttggcattttggtcggctgcgtagtccttctcgttctcgtcgccgtctttgcccaccgctgggtgtacactttcactcatgatggtctctgcgataccgcgttggatatcctggtatgtgacaccggcttgcttctcgagatcttcgaggtcaggcgttttgttgattcgatcataagcacgcagcgcgaacacgaagacgtgttctgaatgagctggttagacatgcaaccgaaaccgaacagaacagaacacttacctcttgggtcaataccctctttctcgatctgcccaaagatcgagtgctcgccgcgacaaatcgacttgtactggtagtccatgatcgcccgagtacccaacgcagcattgtcacgcaaatcaccagcgaatccaggaatcgcagggatgacaatgatcacgcggaacttgcgaccctctttgcctgcgcgcacgcaagcctcgacgatcgcacggccgatcgtgttgaagatcggacgctgttggtcgccagtggcagtgactatgaaggttagcaaagcacactgctagaagagaatgcagacatactgaagaactggttctcaatatacacatagtgctgggcattgcggatggtctcgcagtacgcgttttgaatactgtgctcgttcagaatcccgctgctccagtcgtcactgctgcgcacgatttgagcgcgcacagtgcccacgttaccacgaggcttggacgacaggggcgtcagcgggtgctggacgtattgtccgcaggggtacttgggtcgctgcacggcgatgatatcttcttcttcgcctacgagaccctccatgagtagccaatcgacatcgtggctgcgcttgtatttgtcgcgcttgatgaagttccaacgcagaacaaagtgttcggcaatgtcgtacacacagtcgccctgcaagcccatggccacgtcgtgccagggcatgcgaccaaagtcgactttgctgacttcgttgctctgccagtcttctacgctctggaagtccatgatccggttgttgttgaagtcctgtcctgggaaaatgtcgccccacaagcctgttgggtggacatcggccaatgggtgctggtttgcgtcccatcgtccgaagcatagatcaatgcctccgataaaggccacattgtaatcaatgacaaggaatttctcgtggtgcgccttgattattgttaattatgtcccaatcagtacatgtgacgcacatacccagtaaagagtcatatcagctgcgttctcaaagacattgtggtcggggtggcgcataactcggatattgccgtagccaggagctccctcggggcagaggctccgcaaggcatgtttagtgtgtgcggaattacatgtcagggcttggttaacctatagacaatcagtatatttctttttcttgattggaggaaaataccaacctctttgtagacaatgatataaatcttgacacctgcttcggcgcgtcgcttcaagatctgatccaatcgccattcctggtgctcgacagggggacggcgcaagaagagttccggagagagccaccagtcggcaatgtagatagtctcggtggctttctccagagcttcggagactgcccacatgtaatccttagcatcgacataccacttgatgcgattcccgtcgtggacgggtgcaaaagactggaagcggtgtgactctgcgatctcagcgcgcttgcgatctgtcgcttgttcgtgctcctcgtcatgacgatgattcgggtttatgatattaaaaaacttgccgactttggccttaaaatgtgtagcctcggctttgacctcgtggatatgggtgtcttaagacaaatcaggtcagtttttcttatgttataaaatgtcaatctgccgacctttgagagacccctccagatgatcaattccttgtcccaacttgtccttgaatctttgcatcattgaggcctttagtggagaaaatagttagaagagggggagggggggaagatctggagataatactggttccttaattcgtgacatcacagccctactgggtaaacatgcattgatctgatttgtctccctaccaatgccaagggaaatacagcaacgccgatcgaaatcctccacctgtgctattcttgttattgcctatttagggttgggccgcgtggtggtgtttccgcggttcctaatatcggaccactcgcttctttcttggcaaagtgtggccttagaaattggttgaattagttatgtacaacatataacaggaacaaaatgactaactacaaacagcagagatctctgactagttagttatagagtcgatcgtatagaatgtttagcggtgtatttggtggagatatatccacgatactacgtggcagcatccataagaaaaaagaaacaaagtgactagtgaattttggagataataaaagacaataaacatggaaattccttgattctgcttctcactagtctacctaggtacagtctgacaaccagtattatggctataaaagtgagaaaaaaaaaatataaatataatgtcacctaaaggctaagggagcattttaagagacatcgtagttacataagggcaatgcctctaatattatcccaagccaactacataatattaatatttactccgtaactatagttagttatagaggcgtgcggtgtacggagttaagtaactagtaggttgacccaggttggaaccaatgacgtaattggatctaaactggagccctagagttcctattcgcgccatactgtacacccactttgagattgtttatttgtattagaggtgagagggagaaaggccctacagatgctgtccaagctattattgttctagtcttctacctaggctataagtcattgttgacatggttcacgtgatatgaaccgccttggagctcaatttcaaaacaaccacatttaggactatagattatctacaacatgaaatatatttgtgatagtatcttcccccgtttccaataaaccataagtctatgttagaacgtgaatcattgctcagctcattgttcagatgttattgtttggcgggaatgctgaccgccaccacgtgactggatgggaaaaacaacgttgtcagaggaacgggccattttctgtttatcctctctcgactcacacaacgcggccagcctttcagagccccaggctcgcgattagtcgacatttttggttaatgtgctagcatcggtttggatcgtatattttgtttgccgggtgcacctacctatttttggatttataaacgttgcgaaacgagacacacgactagccatcgccctggttaccggctcctccacttactaacgcaaaggaagcaagcagatcatgatgccgccagaattaggtaagtgcaatgcaagactaaaaaaactctgctgcaggtcatttggttccccatactaacgtgtttccaagcccgagctcactcgcagggcagtgtggtgtcccagacaacacagattgccaaccaaagccggccaggtacggcagaccctgtgcgagcacgctccgaggccctctcacgggctagccgtcgtcctcggtctagaggatcaacagcgagtatccactcaagtaccacccagcaaacccaagaccagcacctcgacgggttcccgcagttcatgccatcgcaagtcggatcaggccagcatatgttcaacaatccggaggacatgctaatacggtttgggcaccagctttcacatcataacggtgcaccgctggatcaatcgatgcaagacacccacgccgggatgtctcgagccgaagactttccaaatcactcgatgcagggccacccgctttcccatcaccctatacagcccgaacttgcaaacggtttgcccaatgtacccgttccccaataccagccgatgtatgatagtggtgttgagaaccacctccctgatcacatcgtcgaggatcaagaaatctcggagccaggggctaaaaaaaaaagaggtgcgagctcgacagtagctaatgacaacgagctgcgaaagctgcttcgtcagtatgagggatggagtctcaaacaaatggcggctgaagtcatgaagaatgagggtggagggggcaaggctgagaaagtgaagcaggtcttcgcgatgatctggtaaggcacattgccgcaaattaactgcaacatttgtctaacagtatacacaggctgagagaaaattgccggaagagcagtggctccgtacgtcgtgaccgggtctattgctgctatgcagagaactgtggaacggaacgcgtctcagtactaaaccctgcatcattcggaaagttggttcgcatcatcttcccgaatgtacagacccggcgtcttggggtccgaggcgagtccaagtatcactacgtcgatttgtcggtcattgaggaaaagcaacaaaagcttgcgcctcttaacccacagattgcccatcatgcaaacggccctgcttctttgccctccagagctgccagtgcgatgcgctcgagaaggtgagatataactgacatcaatctttatttgctctcactgacaaatgactagtgctagcgtacaacaaccgactgccgatactgccgtgttcccatctcccacaacttccttcgctcctcgattcccgaataattcatcttctgccgactgcaattgccaaggccacacgccatctgggccagatgccacaatcacccgcgataatgtagcccagcaggctgggaaaatgatacatcagatgcttcagttcccgatggatgagaacaccgtcgttgataacgatacccttcaacttcccgatatccgtgcatacttacctgcaaacaccgacttgaaagttgctgcagctcttgctgccctgtatcgctcccattgcatttcggtcatcgacagctttcggtattgcaaggaacgaaatcttatgaaatatttctccgctttccatggaacattgactgttcccgttcaaaagttattgacccatcctaaccttgctccatggatcaaggaatgcgattggatgatgtaccagaagatgattgcgtttgtggcacccctcacaacccaggtggtccctaagccagtcctagacgcttttaactccatctcacaacggctttgcgggcacatcgctgaaacctttaagacccaaccaacccatgtctccttagcacgcttgattcccgcgcatatcttctgcaatctcctcaagcatatgcttgatgtgaaccaggctgccaatgccgctgctgcctggctttgccacccggataaccgaaaccaaatgtggacggactttaagactatggtaaatcctagagatatgatgaccaaggcaaacatcccaacgtgtgcggagctagcgacggagcaaattctcaagcatgacgttcgtgcgctcttgactccattgaatgatgccgacccctcggcaagcttgcttttcttcacgcaaccagatagccccgattctgttgaggcgcacaagttccctgtagaaagtgctccgggagacgagtacaacttccccgacaaatgggttcagttcatcctcaacatccccgctgccttttccaaccaccgcacacagtgtgtcattgaaaaagttgatgccttgtgggatagcgtgttgcaccggcttaccctggccggagcaccaagttttagcgcgtggtggatgacaaaagtcttcttccacgagatgatggtctggcaagcagagaagggtgggttcatgtgcaacactcctggatcactgcaaagtgcgacgtttggccctgaaccactcggccattttcagatgagacaagcgtctgttcccgaggcatccccttttgagaacgattcaaaacctcacccaagtcctcctatggctcacagtggtcatcaaagccagcctcccagtcagcactcggatttcaaacaccctcccagcgagaagcgactctctcttcaagagggcttccaaggacataacaatgacgacagcgcaattgaccttgaggatgatactatgctgctagcagttggtaaatacggtgatatgatggtctccgatcccgcagatgccgaaggcgatgtcgtcgtcgtctagtaatttttgatttctgttcatgagttggagttggatatcccttgattctagaggcttctctattggttgtggatggcgtttccacgattttcctttgttccttttttcatctcctttgtttgcatgaagcgacgagacatgagcaatgaggctctccagtcttccttgcaagccggcacgccggatgctttctttgatcaacctacagcatttaattggcgtggcggaaaccaggaccaacttggttcttgcttctcctattcctgtttgtttactttcgggtctcatgttgggtccctctgtacatattacttgtggacgtaccttgatcatggtgcagtactctaatgtgcatgaataactgttgacacactttccgtatgacctttaacttgattccatatcttctgacttggcaagacataattgggaagatatcctcagattgataatgccattggctcctaagtccgctgttgttctttaaccttctttgcccaaccaaagaactagcttttatgaacccatgtgagactagttatcaatgacattcatagctgtattctagagaacggcacagaatctagagagcagtacaaaatcagagaacaacaggtctctggacatgcatagaaacctcgaagtcctctctctgtacagtctatacttttcaccatctacgtatagcattcatacattttataccatcgatacaagaaacaaacattcaaagagcaatgacgccaacaacaccaaagacaaagatagacattgttaacacgtcatgaaatcagagtgtagtagtaatcgaaaaaaaataaaaaacttcgctccttccggttgttcaatcccaagacgttcgtttggctttaactacgtagtcacactacgtagtgagtgagtgcacttcgaccggggaatttacaattgaagtaggtattttagagtaaataaatgcttcgcctgggttccggggaatattgttcgtttagagttgtagtgtagtgtagcgatcatgacattttggtcgtgaaagtatatatccgaaaacggagtacaacgtacgtagttacatgtagttgagcataagcgtagggtttagtgtgaggttcgcagtagatagttaccccactgctatacattaggtacattgtagatcaattgctttatgcgccccggacttcatcgtggagggagtcattgacgatgtatccgcacctttctgcaatatagctctattttcactgctttaagatctcaattttgatttcgtgctctgctcactatttacagtttagctacgtaggcagataacctcgaacgatcttgtagaatgctggaattggagtcaatagaagcttaaatcaattctttttaaacgtgcagccgctagcccagatcaggttagggtttattagtttagatatcgaaaagatcaaagaagcaagggtgatatttgcaggaagatagcaaaaaaaatttgacatatgatcaagtacagttgttcgcgtagataagatggatatataaacaagtacatgaagaagaatcgcttctactccggacgacaaataagtcgggggctcacgagacaggctgtgagattgactgccggaccaaatgaccaacacgaggcttcacgatggacccggcgaagctgtgctcggctcgcccccgactcccaggctcgggactaccaatactggctgacggcagtgtcgtaaacgcagagtgcccatcccaagcagacacttggtagatgaggcatgcaagtattaagatagatgaaatgtaaatcaagattcgcgcccaagtcggttcatgagaatgcttaggttttgtcttccttgggctcctctttgggctcttctttaggaggctcttctttcgcctcgtctttggcttttggggagaatctccatcggtcccagttctccagcacccaccagttggtgacgtaggctgcatggtagagccagttcatgatttcttcatcctcatactcgtcctggaccgcggacgcgagatcggcaaggctgaagcgctcgatcgggctcagctcgttcgggtccttggacacatcagtgaagcgccattccacgtcgttgactagcggaatcactaggcggaactcgggacgggcggccgaccgaacagagagccatgaaccaccagtgttcatgactgtgaagtgccaggcttcgcgtccgtcctgcttgacgacctgcggtcggatcatggattgaccttcgtacagcgagcgaatgtcgcgtgcggcacgcgtgctgtcctggctgagggatgccgactcgatcaacaagtcgatgatggtggggacgatctgggtgctgatgactggggtgtcgatctggacgggaggaaggagcgggtgtgcaatcacgatcggcaccttgaagctgccgacgtgggggttgtcatagggagtgataccgccgtcgttggggagggaaaggccgtgatcgccagccatgacgaacaaggtctcattagcgactcccttctcctcctggatatcgatgagctccgagagccaatcatcgacataaccgacggagttcaggtatcgattcatatcgccgttcgcaccggatttggcgcccatcatatcttcaaaggcgtcgttcggaattccccaaggatgatgggtggtactcgtgaggtgggtgaggaagagacgctggtggtcacgttccgcatcatcaatagcatcacggatgtactctcgaagctcagtttccggatagccatagtagttcacctcggcacttttaaccgggaaatgcttggcatcgggcttgatgatcgtctcttttgtctgtttatcgcggaatcccaagtgcggagtcaacttgaactgattgtcgtacatttcggtgaccgacatcataaaggtcgaatgccacggccacttggtgaagtcgtcggtctcactgttgatatccggttgctgactcaacgtgtcgaagacctggggcagacatggctggtagatatggtgttcgaattcgcggttgaaatcggcgaccagtggggtcacaccacagaaacttcccgtcaaactcttgagagtataggtggaggaggtgatggcatccttggcactgataccaccatacgccttgcggccgaaacgggtatcgtcgtgctcaaagccggtggggaagttggtcaagaactcggcagtccgggtgaggttggcaaggcgttccacaacctcttggggaatggtcttgttcttccaggtttccgcgatgcgtttgtacatgaagctgtccttttgcagagggaagatatcggcacgtgcactctcgagtttcaagaatacgacatgcttgatcttcacatcgccgctggctagtgcgttgtgaatctcctgcagcaccggcttgtcgaggttggagatgtgcaatgggtccccatgcgggtcgtagtgcagcgccaaggggtcggattgatcccagtcctcgaaaccttcgagcggttccttggacatccaggtccattgaggtgcggggcccaatgcagtgatcctatccagatactcaaagcgggagggtgtgccagcggtatcgacgggggattgacgctccgcaccctcaatgatggtggtcaaaggcaaggtggtggacatgtacatatagaccgggtcccacggtcgcataaagcggagtaagaggaagagactgaacaatcccaggacgagggcccgttgaggtacaccgtcggtgactcgcttggaggcggggagacggttgggtaggcgagcggtgttcaacagatgatccccttcttcgttatcgctgagatcatcgttgtcatccatggcgatttgttcgtagattcgaggatcgggcaggtcggcgactgacgatttagatcggggccagaagcgctgcaccaggggctccacgtgtgggcgcagacgaccaaacagccaccgaacgggccaggcccagacatgcaggatgccgcccgagatggcatggatggaatgggcagcgaacaatgagattgtgaggaggatggcctcgacgatcagaaatccggtcagaccggtcaggagggtgtgaatggcagcggcatcaccattgaaggatttggcttggcgccagtggatctcggcacctgtgaaaacgtagaaggaggtattggcggcggccatgaaggagacgatgagactgcatattgttagtgacgagattaattaattgtattcagatcaagtctaaatctattgaaaaagacccgaaagaatgtagcaatgcagtggaaaaaggggcacgtggacacttacctagacgggataaccaagatagcgagcagagcggctcccggtcgccacgcgaccttctgggccagaatgcgaaacagcaatagcagcatcacatcctggaaaaagaaggtgagaccccataggaatagtcgcggcaggggtagagaatatatatgagcgtagagatggagcaatttggcactgaataacgagagaacggccagggtgaaaaagtagcgacgggcaaagtcccagacggcatccagggtctcaccaggcgagagacgaacacgccggatgccgtggcttaaataagcatgaacagcgtgaacgactttcatggtcatatgaatgaatgaaatgtgtatatatatacttcacacccccgacatttaagaaaagaaaagaagaagaagtcggaagtaagaagtaagggagaaggaagccaagggtcttgacaagccgagtgcccaggtgggatttagtggagacgatgactgggaccattttaggtacgacatacgagagacgtgagacgtgattatatttgggggttaataggtgattatggtgttaatcatgagctacgatggattaaatgtgtattagacacgtatcctcctccgcttgactcttctatatcccatcttaatacctatattctgtcaattaccctccgcttcccccccccaaggcccccccaagccccgaaagccccgaaaagccaagacaaatgaggccccgctctccggaattgaaataaaaaaataaaaaatccggtttctcctcctttttcctcctcggggcttattgtgttcatcatggtagggagcttattcggttggattgcgctccttttcgagccattagcctttcaggttcctctgatcgaacctcaacccagactcaaagcagagaatggtatagccgttccagcagagggcccctggcaggagatcatcaccggccattatgcggttccccccgtattgaaaatccatgaccgaaacagtgtggtcaaatggagctggcaacgagaagatgtcacccaacccctgcctcctttgattcatagcggcttatatagcgggttcaacgatgcgaccgatatgaaatggatgcggggtgggagaagcatcgctgccgtctacagtgccctcgtcgtggtcatcaaccacacccccgaccaaccctccaccgataagaaaatcaccttcgcccttaaccgagcaaacgatgtcctacacaatgcccatactatcgagcccctgcccggtgaccgtctcgccgtgggaaccaccggacagcgaccctgggatggcattttggtctacaacatgagctcggacctccccctcgtcgacgaaccgcccgtattgcaaaagatcgaaggtctgcgcgcgatccacgccatgatctgggatgagcaggggcagatgctgtgggcgaccggcaccgacgccgccgccgatggctccgaccccgttccggcttacggtgtcattcagggataccccttcgatgccgagacgggcctactcagcatcgacgaagcctatcgattccgattccccgagtactgggatatcgacgtcgaatggggccatggatacagctggtgggccgggccccatgacctcgtccctgttcccaacgaacgggtattcctcgtctccaacgatatcggtctccatgccttcgatatcgataagatggaattcaccgccgcatacgacgaggtcgtcgagaaatatatgcccggcttcgaggtcaccaccaacgaccggcacggcatcaatcgccagggcgaatacgtcgagttgccgcagtcggacctcaaggggttcagtctcgctcccgatggaagcttcatatacacccagtctctatggcgactataccgggggaattataccagtctcgtggtggatggtgtgcgtacccagatcatgaaagggaatgaaatctatcggtcgcgatggttcggcgacatcgatggctggcccaaaccgaagacttagtgttttaacctgtatagcacgcctatgggctccacatataaatctgatataatgaacgttctagctatgactttgcctgtcatttacaatgccttgttgacttacaacatcctcgcctccccatctctctacatccctatttcgttagaatagacttcccaaccccggaagaggcgttgattactttcccattgtgccaccataagcaaataccgtcgacatcggatatccaattccatgtactccgtactcctccctaccagaccttccattttcagaaagttccaaattaagacaacgctactccgaatccgccatggccccggccctagtcagggtaggtgacgcaagccaaaatccccaccaagtccctgacaaccctgacaagataacagggctgatttgttggcggatccccataggccatcgataaaccctctaggctcttacctcttgcctcctaggtgcatggccccagattccgaatccgaatctgactctgtgcggtctgtgctgagtaatatattgcaatgcaaccccccgagccataatccataatcattaatacgagcttactacggatacgtcgtacgggcttatgattccgtatctggcgtgtttcagaatacggtcccgcttgcacttccatcgccaaaccataacggcggttggcgggtggaggcgccttcgaagacccgcttcgtacaatacataacaggaggcgatggatggtgggtgtcgatcgcacagccctgaggagattgatagggagacaggacccacgcgccggcgaatcagcacgagacccttttcctgaaataggtagttgctggttctggttcgggttctggttcgtacatctgtgggcggcgaatcggacgtgagcaggagttttctggcgctcgccactgccaaggctaggaacagggattgggaatgggctaaacgagtaagagatttttatgggattttctagcacttgggtgggagactgagtgcattcatattcatatcatgcgatgttagatagaattcgtagtatggtatggagtacggagtagcaaggaaatatggctagagtgattctagttaatctatcagttgagttgattatccggacatcaatcctccggtactgatgcgagggatccttctatccatatcgatgtattcatgtggctggaaaaataagaattctcagtcatcaactaagccaacctaggtatgagctagaatatctgccttgtctcgtaaacgaaagcgacgagatacaacgcaaagaccaagtcccgtcaaagccgaagcaagctgattgaagtcccagatcgaagaaagcaatctttccacatcagccaaccacaaaggatcagcaaacatcgacaaagctcacgcatcaacaagaccctttcgctttaggaatagtgggattttggctatcatcgctgcatacgagtagattgtgctgatagaagcctcgtttccgtaagccagatagcttagggccgactgtccgtgtgccggagagccgatccatatgactcctcgcctgtgtttgcacttccacctgttgttgttgagattgagtgtctggagtaaatgtcctatgttagctatctgatgctcccactgatcactttgatattctattcttacttcaccaaactcttcagtcatgtcggtggtaatgtatggatgtagcttgtctccaacgagcactgggacttgttagcagactgagattgcatgctaaaatccttgcaaggggcccttcaatcggcatgaaagaagtgcttttctccagtagcgatcaatattcatagggaaagtaaactctgagtactccatttcgggttggggttgctcacgtttgtcattcacgtcatcctccttttttcccttggagtccttagggttggagtcatactccagggattcatactcctcatccatgtcgtaatgccccttcctaaagtcgtcttcttgaatcactggaacaacctcaatcttgatcccgagggatttgaaaacggagtacaacacaaggtcagcacccttgagtgccctcggaagtagcattggagcctcatcggatgtatgaggataagcgtgagagcaatagaacccgagagcgccacctagggagagttaacttggtattcttcgtccaaataacggcatatcgcaaacacacccttttgcatgaagccaggctccatgataagttcttgcaagtaaccatatagcggaaagctcttgggatcaacaatcatgcttggtggaatcgatcctcccactggctcggttatgtaaaggttgtacgtcaaggtgatccgctcgccttccgttattgttttgatctcgtgctcgcagtcactatagaatgctgcccactgaatggcaaacgcgctctgctgatcccagtcaaacacaacctgtcttccctcgtgattaacgaccaagtcgccccctttgaactgagagggtaaacaaacgaccagcgagccgatttgggtcttggatcgcggcgtgtccacatgctgccggaaaagcccagatggtcccgagtaaacctatggttagcaggcacattagtattcgttgcagaagaggtattggattagcatacattcagcttgtataactcggcactcagtttccggaagggcaaagagtcctgcgcctctgtgttgaagttcggaaggagaacttgctccacattggggagaattccgaattccgctggatggaagctggtgaagaaatgttcagggtcaagctttccagcctttcgatattcagggtcgataacatcttgctgtcctctgccaaagctagcaggatcgcaaactgccaccaactgacgcaaatcatcggatgcagattgggggttggcgttcgcatcaagaggtagagccaattctcgcgcgatattatcaccatctgtacgccagcagattctcactggcggagacacagagatgggtttggaggacttcgaattagctgcgacatttgtaccaatggggacaagacctccacagacaaaggttgcagatgccttttttccgacaacgaaagcctccagctgtttacagatcttcttgaacgcgaggccagtcaatgatggaaccgcggacttagacctcttcttgctcgaagaagccatggtgggctaagatgggaaacagtagggaggaatgggaaaaggagaaggaggatagttaagtaggaggagggaggggagacggtgaggccataaaccacaaacaaccctggaagggaggtggttgcctaaagttggaggtcaccatgcgtgccagcctgaattcaaacaaaagatgtctaggctacacctcctgcctagtcaaaagaatgcgcgaatattccatactaccccagcgtctgactgcaatatgacgtgcaataggatgtcatcagcgcaaagagattaggtgaaaactaaggctcaagggtgtagttgtagctttctgggagtcagttttcaaccgtttcatacctcttagaatgaagttgtaatggccgccagactactccatctactccgtatggagtagacatcttgatctatggcttatatacgtggctatacgtacctactatattgcctcgtggggctttcctatcctagctgccgccgctttcatatgcttccaaggcaaagaaaggcattcgtaccaaatgctatctctttcgaccattgcaagctcttggtcttgcttgttaccgacttttcccatatgacgaagccccagagagctcaccaggaagacaactaccatgccagcaaatataatccaatacgcagcacgatacccctcgagaagctgaccgcccgtttgagaagatgtacttgtatcgtttgccgagccatcatcttgggcggtggaggaagcggctatgacggcagtgacaaccagtccaacacagttacccagttgggagatggtattgaagacactcccagctagagccatcgagtcatcagggaatgcccgagaaatgatcagactagacacagtctatagcactagccaaacgataagtcggtatttgcatctttcatatcagatacacaagttgaggaagttactcaccattgattggttttaaagttatagcaacaaaggctgcagctcaatatttccagttgggggaggcggccgccattaaaataggtgaaatcgcagtcatcagtgcactcatccccagcagcaggttgacattcaccttcgacatcagatgagcagtaactatgttggtggccacgccaactacagccataggcaagaagcgaatggaagcttggagggccgagatgtcctggacgtcctggaagaacaaagttgatatgtactaaaaagagttgaacccggcccatgtgaagaaaatggccacacagataagacggcagatttcgccataaagcatttagaatcaaggctggcctgttgtgctttacctaccatttcaccaaaagcgagaagacagggaggagtgataaagagataacgggtagcacgatgtattggggctcatacatattcctgtaggtatatgtgaccatcctatagaaatgtcagcaacattggataaggaattaaataaaaagatcaaggatgatccacgcaagtacataggatagcaatccaaatgctaaggcgagagttgttacgccaatccaatcaatattgtaagcaagcttataccctgtttcccggcatagcttcatcgaatccgggtccgatggaaggatcaagatggatccgatcaacaatacggcatcgataatgccggtgatgtaaaaccttcatcaccagctaatggtattggtgaaaacaccaccaagaatgagtcccaacacgtagcctagtggctgtcccttatgtcgctgcaaaagcaatgtacctctagcgcccaggtggaaagaacgcagtgactagcgacgtggatgtcgggagacacatagccgcaaagagccctagaagcgcacggaaaatgatgaattggttaccagtgcgggcaagtccacgagaagccgctcccgatcagccacattctcctagagccaaccacatctgcaacggagccgaatgctagcaaggtgcatcctgcagataaagcatataccgatgccagctagaagatcagattgtggtcgaggttgatatcggttgagatacgaggaagtgcggtggtcagaatttcagttcccgggacactgataaaagtgacaccagttattatgtttataatccagagcgactccaatgccgacttgccattcttttccaatgactcctcggatagaacgttcccatctggctttggcggctctctttccgtttccacgacctccttgtcgcgtcttttatcgtacgattccgccaacgccggctgttgtggtcacggtcgtcatggtcgcgaaagctgctttgtctcacggtatgagagatgaaagagaccattcaaggaatccggtgagaacaacaggtcacccagccctccaaatatgacggaaggaagttgagaagtggctgaggaaatcaagtaagtaggtaggcggcattcagtctaggtctacaatgagggaatattctgtcaaaggcggggaggcgaccaggtgcaggggtacgactgtgtatggcgcgtatagcgctcaagcctggatggcatgcctgaatgcctgattcgcgcctgatattgctgcctgattttagaccatagcatggcaaactatcaaccaatatcccgtacaaaatcttttttttccggtgtgttttaacctacatttccagtgaaagcagtgatgtcgtgccatagtgcttatattatgtagcctacatatactccgtcttctctgcctttttcattctctttttccattcaaaaacatatatatcttattcttggtcaaattgatcttcaaatgggcttgtcataatagaggaagctcgcagtgcgaactcgcaatcatatttcctgagtatatattcaaggaaagaacgataggcagtctggcatagcagacaagacgagagcaaccaacaacaccaaccttccaagtaggccagctagcaagtataggggatcatggagcctcagttatcattcgatcttcctagaaaagtagcaccttgcaaaatctccttcactctgagtctctaccagacatggtaaaccgaaaatcctttctgcctgaaaaacagtgctcaggctttgccgcttttttctcactgacggtccattacataatctgaatgatttgctcacagattatgagcccctgagcatcctgatccacccactgatcatcctctaagcactctgagttgctcaccgagtgctcactgagtgtactcctgagtgtactcctgagtgtagaaatgagcggtctgaggacggattacggagtaagtttcatgaataactataaatgcgacacgctgatcccatcacgtgcaaccctctcatagatcgcccatcaacgtgactagtgttttgcatctgtcgacagacgagtctcaatctaggtattagatagaggaattccagtacccacgtatacctgcctttaagcatattcataaggctcctatgccctaataatccgtataatgaacgttcccagtgcaactacctgcatatgatgtcactgaagaattgtggagtaatcttccttgaagaacaattagatgggcgtaacccagtatgaattcaggcattgatcagcataacttaagcattacatattaactaactagtatagatgataatatctattccgagtttaatttgaccgaaggccaaaagtctccgacaagcttggactccggaggaattccatggtcgtacgccatatcaaacatctgatttgtggagactttgctcggagaatcgccctctatggtttagcttgacatcaaattccacagaactcctagacggatctttaatccgtttatggtttgatccacacctatcagagatttcattggcagtgatgtgtaggaactggtagaaaatggcgcggcttaggggctagatgccgatcaatcaaagacatgtaaaacttgtcagttgtagaagctatttggtttaaaaggagtgccgtctgccttttcctcttagcgctaccatccttcattttcctgcaaaattacatttacacaacatcataatgagtatcacttttgaggttttccgcggctccaacgagggcaagatcgtggccgacaagaccactcgtgtcctggagcccaacgaggtctacatcgagacaacacactccggtctgtgtggcacagatgaacactacctcacttccggcatagctctcggccatgagggtgtcggtatcgttcgccagctgggccgggacgtcaccagtgtaaaggttggagcgcgtgttggatttggatacacacactacgtgtgtggaaactgcgagaagtgcttatctggtacgagttccaacccccaaaccaagaccgacaacttgctaatagtaaaccaaaatcaggctgggaccaatactgcgagaataagaaggagtacggctcacacgaccacgacctaggctcgttcagcggcggcaccgtttgggacgctcgatgcgtcgtccccatcccggacggctatgagtccgccgacgccgcgcccatgatgtgtgccggcgccaccgtctggacctgtctgatggagtacggcgtcaagccgatcgaccgggttgctgtcatgggtgtcggtggtctgggccacctagccatcaagctcgcttcggcgatgggctgccatgtggttgttttgtccagctcagacgcgaagcgcaaggaggctttcgagttcggcgcgtccgaataccacgtcttccgcaagggtgaagaactcgaggacttcaagcctgtgaaccacctactgctttgcggcagcggcagtgtcgactactccagcctcatcccaattatggatgtacatggctcaatctaccccttgactgtcgacatggttccctcgcccgttccccttgtgttcatgaatctcaagggcatccgtatccagggttcgcttgttgcatcgcgccgcagtctgcgttcattgcttgagtttgttgccgctaagaagattaccccgactagcatgatcttccccttgaccaccgaaggtatcgagactgctatgcagactctgcgtggtggaaagatgagataccgcggtgttctggttcgggagtaaatggtgatcagcatagatggagagaggttttaatagtcagcatgtattatattcccactagtattagaacgtttatagatatggcaagtgcagatgcaatacacgaaattgagacaatacctcgttagggtatgcttaaattatggcggttggtgagattttcacatagacatttttgagaatagaaaaattagggtatgagaacaacgttaccgacttaaaaggcttctttaggcgctaagatgctgatgtggactgtgctcagctgggctgtcttctgattggctcgtttatacgaggcttgccaagcatgcgtattcggcttcaggcttggcaaaccattaaaccatcctagtcccccatgtagctcaactcaactggctgtattttcgaaaattgagatcactgtgtaaattcacatgttatatagggtacttattcacggttctgacaatctgaacgtgtttatttacaaggccctcgacgggaaatgccatgaacaaccaaaaaaaacaatatagaatacatatatcaatcaatcagaaaagccaccaactcctggtattcaccggatcaagctgcaccatcatatttctgtcgtctcttcatagacttccattgaacaagtccagcaccaataaaagataggagtgcggcagcaacagacacgtagaatgtctgaatgacagcaatgttataggcgtgtaggacggagggcagcatatttttgggcacgcgctgcgataaatttgcagcgccggcttttattaacgcgtctgagttgatatttggagcataagccgttatgcttgcaacaaggcgattctcaaaaacggtttgagcaattgaaataaacattgcgccgctgagactctgtgcaaatgtaataatggcgattccgattggtatgtcctgtaatggcagtacagtctgaagtgcgttgatgcattgctgaaagccaattcctgctccaattccaagaatgacttggtatccaatccactccggatatccgctgtttactctgaacgtcgtacacagtccagaaccaaccgtgagaaatgcgcttccaacgaacatgagtggcgtgtagtatccaacaatatttaccaataaccctgccaaagcagagaacacaatcatagccaccaccatcggaagattgttgattccagattgtgaggctgaatcttccttgactgcttgaaaccagatagggagcttgaaaaatgttagcaatgaagctgataggactgtattgagaacccacatagtatccgaagacaaaaaaagatccacctaaaaatgttgcgtgaatcactgccccaagcacatttcgattcttgagtaaacgaggcggtactgtagcgtcgtcctgcttccagacctggatagcacaccacgcaaaaccgaatacgccgaatagaacaaatagggcaattattcgagcgttgttccagctgtatttggtgccgccccattgcaggcataacagaagggagacgacggcggggatgaatgcaagtataccaagaggatccattcgctgtagttgtccaaggcggcttattttgggttttggtgatgtagagtccttgaagaagaataaaatgacaaggccggtgaggacaccaaaaggtatatttatccaaaagcaccatctccaactgacatgatcagttaagagtccccccagtctatggttaaattagccgccatctacgatattggaataacgagacttacagtggtcccgtaattgtcgcaatcccactagtgctaccgatgattccgaaatagagggcacgccggtgaaggggcacaccattcgcaagtacgagtagagcacccggggacaatcctccagatccgatgccggcaattgctcgcccaagaatcaatcccttcgatgttggtgtcactgcacatatcagagagccaagttcaaacaagccgagagcaatcatgtatgtccatttcgtcgagtaatatgtgtataccttgccaaatggtagggtgacggcacatgtggttaaaagataagcactggcataccacgacaagtcgcccagtgagttgaattgttcagtgattttgggaacggcggttgagaggattgtgttgtcctggtaagtcgtccgcattagctcatgaaatagtaaccataatcgtcaagcttaccaaggcgatacaaaaggattgaaagcaaagtcctatcaaaatcggagcaagctttgagcttgatggatagacttgcttttcttcttcatcatcactgtccccagttcgagcctctttcaatgggatgtcatctcgatttgtatagacttcatccccgaaatctttcatgcctgaactgtgtgccattaaactgcaagttaaatcccccagttgttattgcaactgtgagaactcatagaaatctgtttgatcgaatcatccgtgctgaagcctgaggagtgtttgaaataggcaaggtagaagctgccacattaaatccaagtgtggatgtacagaacttgccttgtagtacatcatgtacctacattactactgccggatgtaacccgataaagcaagggggttatatcttgatttctcggggtttttcactttgtcctggtcacattcttactggcttgattggtatgcaccacttcttccccgacaagacgcttgctagacccaagcagcatatacttatttgatcaaattatatggatcatgctctgaaaatatcacttgcccaattgaataatcagtctaataacaaataaggctgtatcatttgacatcgttagtcactcgaggttgatcacttccgacgtgatgaatctcgagacccttcattccagtgagactgtaacctcactaaacacagaacctatgatggctagatacttttagtaatgaatagcttcgaagcctgtgcaatattccgatggtcttccaatcaatgtgccacctctgtataaccaactaactcgcacaaagcttgtgtgcgttttatcattgtcaaaatacactgattttctcatacagaccaccaagggttatcgtggccggaccactgttaattgacgagataatatatatacaaagtgcaaattgatcgttggagccggaataaacgtggtagccacaaggccacaacatcactcattaaagtaccgtggtagcagcttgagcaagcctcaccaactacccttgtataatataaaattgtatactagatatccaatattgggaggactaattcgaaagactctagtgatcttattgtagtgcgaagaaaacataagattgcccgaggagactcagcaatcgcaagtatctcaggcctcatttcgaagggatggatagaaggggcacccggctaacaggtttctagccccgtcagattttttaggaattctgatccattaacgatgtaagtagaggagtgaatattattccgaggaatgcatgtgagctgattcccaactttattcttctatgagctctattcttaccaacgagaatcgggagctcatactaggaagcttcttgagctgtttatattatttccaacctattgatcacataatcttcgctcgccgatttgaggcctaggtataaagcttttctttctttttgtgcggattggtccacggatagaagatattatgacgagctcgaacgatttgtcagtgataatgtagcggaagtgcagtaagcctagattcgatggattgtatgtgatttgtgcaccgatacttaaattcttaagactagatggcatgaaagtatatgttccgacacctagcggcgtgctatgaggagcattgtgccgtgggagacttgacagtgagtattcgagagggaggatactccgtggtggttgaccagctccgggactcataattttccgagaacggcagcgaaacaggatgtaaagcatgaagtcggattggaatgagggtagaagagctgtttgagctacgtaatcactatttggaggggcaacccctccgatacatagagtacatatgtaaataccgagcaaatcttgaacaattcggatctctatcgataaaacgtgtcccccacaaaatcaacaaggcccaatagttcttttgatccatatccggggcacttcagaccacagttatgacgcaccagaatggaaacccgacggtattcagtagtgatctccaagtttatgaaaatgcgagatacagaaacacgcgctggagcgccccgaaacgtcatagaccgcgatctgcacgccttgtcctagaactctatcagtcgggccaaatgacttaagtggctgatgcaagggcatcattctagaaaatcatagttgagaaaatttgtatatcgatgtgctccatgtcttgaactggtgccgccatcaacactccttcaggcaaaaactccctagtctctattaggaatagacccggaatatcaatattccttatcaacaatcagcacaaaaatacattgctgaccaatcagtatctaccgctttggtctatttactttcctttccccaccgtcagcttagagtcaacttcccatcattcctgcaatgcccgttacagttgcgcaaattctcgcgccctacgagtataaaccagagcaagtggagcgggtagcctcccgcacggtacaacctcccattaccatagttgagcccaacccagaatggccgcaacggttcgaagaagtcaaagcgcggattcaaaaagcccttgggcccttggtctcggagattactcattccggctctaccagtgttcccggcttaccagcgaaagacattattgatgttgatgtgacactgaaagatgccatgaatgaactatcctatgtgaagcctctggaagaggcaggttttcggttcatcttgcgcgagccgctttggcaccaacaccggttctttgtggagaactggcccgaagcctaccacgtcaatgtccatgtgtggggtcccgactcgcccgaagctacgcgacatcgtatctttcgtgactggttgctcaaaacgccatcggatctagaactatatgccaaagtgaagcgcgaagcggctgaacaagcggctatagctggcgattcgatgatggattataccctacggaaagacgaaacgatccataagatcctaggacgagcattccgcgatttaggctatatttaatgaaacactcaagaggcgattaaattggtactgtcacgatctggaggatcggtggctcgctcctacccgttgcgctcctacccgttgaggaaggaaacgttccttcctattgcgcagggaagctaagcccgcgcattaggattttgcagggtttgtatgatttgtacttattgtttcgttgaaacttgagatacggagcccactgctccaacgattaacccatagacctttatccggtagatatgaaatagggctgtatatattgtagaagtggatttcagccggaactgcctgattaggcaagttgcattgctccccaggattcggccccgggttttatagagtatggagtagtggagaggtgacgcgcaacatgtggggattggtggcatggtgtatatcacggccaaggttttttccctttttctccgtttctcccctttttcccctccaaagttgatctcggagaaagcacccgacaaaacaatacaaggcaatctagggctaaaaaagagagaccccatgcgggagtctttataggaacaagagactgaaagagatctataggcgcaaagatatacactatagaatattttatttctccttcacgcttgctaatgcaagttcatattttccggtgtacggagtacagaccgcattggggaatagaaagacatatgagactctcgctcatatgaacactgcccaagtgaccctgtgcccgggctgctgatcagagaggaaggttaaacaaataacaagctattattggcacttagtggcgtacattggcattgaatttcctaagagtttccacttggctgaaatctgataggcggaaaagtgatcggcgggctctgatcgtgcacaagcccaaaacacccgctaactgagtctggagaagccgagagattgcttaatgaatttgtatttatgtactacctgggtgagacaggtattgattggatcgggtgggcactcagattccaaaagtcgtggaaatgtactccgtatcgggttggcctccaatgtccatgcaaattgttgtaaacctggaggtggtgggaacagccaatccacatggagcctgcttgctcgcatagttggattcaaggataatagtggaccccgagcagtagcttcaaatcaaattatgtgtttggtctggtgtacaaagtatattgaagcggagggcaagaaattatccaggccccctggtctagagaggtcaaggctcctagaagctttttaaaaccagccgaataccccgcgatgatcattctttttttccgtgttatatatattcctcattttatatcttctggcgtttcggtctatatattggcagattaaaagcatatagaggattatcattgaacgacgccactatgcagaccaggcggttcttgggcctcaacggcaccaagcttcagatcgccatcggcttcttggctggcatggacttcctgctgtttggttatgatcaaggcgtgactggtggtttgctgacactggactctttcgtcaaatatttccccgaaatcaacactctagattcatataccgagaactggagctcagcagcaaagagcaaccagtcaacccgacaaggtatcacggtcgcagcgtacaacctgggatgtttcgctggctcgattcctacaatctggatcggtaacattttgggtcgtcggaaggctatctttgtcggttcttttattatgtgtatcggtgccatccttcagtgcacatcctacggacttgctcagcttgttatcggtcgattggtcactgggttcggttagtatggcgaaacacatggagtagcaatccattaacatgaactgcaggcaacggaatcaacacctctacggtcccgacttggcagtcaggtaagcaaaatgaagacaatcccgcctcactgtattgttccgattcgcctcgccgctatatcttgattattgcgagcgatggattggcgagagtggcagtaaataatgaaaattatctaacatcgagtagaatgctgcaaatcccaccgacgaggtcagatggtcatgatcgagggtgccatgatcacatgcggtataaccatcagttactggatcgatttcggattgatgtttgcagacccaaacgaagtcgcttggagattcccgctggcgttccaaatcttcttcgccgcgattattctgggtttcgtcatgttcctccccgagtcaccccgttggcttattctaaagggtcgcgaggaagaagcaaaagagatcctggcatgcttgatgggtgacgaggctgatgagttgttcatcgacaccgaattcaccgctatcaaggctactgttctcgaaatggcaacgggatcattccgggacatgttcaccatgggcgaagaccgtcatttccaccgcactatgttggcatatgtcaaccaaatgttccagcaaatttccggcatcaacttgatcacctactatattcccacccttctggagcaacaggtcggactggatgccacgacttcacgtcttatctctgcatgtaatggaacggaatatttcatcgcgtcctggatagccgtgttcacagtcgaaaagtttggccgtcgaacactcatgctcttcggtgcggtgggaatgtcgatttcaatggcggtgcttgctatcgccgacagcatttcctcaagccacaaacagacctctataggtgtcaaggcaggtgtggcacagacagtatttctgtttgtgtttaataccttttttgccatcggttggcttgggatgacttggttgtatccagccgagattgtcccactgaagattcgtgccccagctaatgcattgtctacttcttcgaactggatttggaacttcatggttgtcatgattacccctgttgcttttgaaagcattggttacaagacctatgtcattttcgccgtgatgtaagtcctttttggtcccctatcactatattttgtactgaccagcttagcaatgctgccatcgtgcccgtcgtctatttcttcttccccgagactaccatgcgttcattggaagagatggaccgtatattccgcaaaactaccaacgtcttcaatgtggtctcgcttgctcgcactgagccccatatgtatggttcaaatggtgaactcttgcgtactttggatgatgtcgaggatgatgctgttcgtcgtgccagcttcctaaacaaggagagtaaggttcaccaccagagccacactcagcacgcagagcaatacagcgacgaacacaccagcgaggtgaaatgatctcggtctgttgttttgagatcatccgctctcttctccagacatctagtatgactttactgttctgagccatactgagttattcatttgtagccatctcgcgatctaccccaatacccctcgttagactgggcgtttttcattctttcatgatcctgaaatcacattgcacataatatttctccattctccagctccattgaaccttgtacggcttcacttggtgcgctctcgagttctgctttaagacacccagtgttatagattctatcgattcaaaagaaatagggtttgaacacaatcgttggccattctatgagatttaggtatatagctgatctctctatggtctatacatcaaacccaaaagacgaaaaaatacatcagaaacacacgtatatcgcgagaccaaaaggatttacagcttgctcttggctggctcattcttgagcaatgccgagttccatgggtaagggtcaaacaccaagtcgttaacagggttctcctcgcttgcgcggcggaacagatcctcgtacaccttgccgtcatagcgacccaggctgctgtccaggtgccagtcgggaatcgcccaagcatcgaccaatcggacagcgtgcgggcggatcgcgtcgagtagctttaatacggcagtagtacgagtcaaggtaatttgtcgcacagtaaccgcaccggaagagaagaactcggcggcttcacgctctagagtgtgcagcgagaagagtctgaataattgatgcaggaggcccttggtctctggatccaaggccgctgagagttcaggggaggaaaccgcctcgtagaagttcttcaccaccaggtactgagaatgagacgtagacaagcgccagaagtcaaccaaaaggctgttccaggagcgcttctcagcatcccgatgcttgagggcctcgaaggtcagatgagctgtgcgccaggcaaaggcagccacaatgtccttgtcttcatcgagcacatcgaatgaagctcccttgtcgcgacggtcgaggtatgtctgaagaatgcggctagtgtcgttatcagccggcttaccggccaggacggcacgggcagatttgagaagctattaatacggtcagttaggagtaaatagaatggaagaaagaactgcgacatacatattgtgcaacctgctgggtcaacatatagttatcaccttcccaagtcagtgtgggcagataatctgcgtaagccggtccaatgccgctgtagctgctgtatccgtgaccaccacaggcgcggcggcagacctccagaccctcaccggcagtggtactggcgagagccttaagaccacatgaggtggcgtgcagatccgccaggaggttcgcaccggcacggagttgctcgggtccagcgccccgcgactcctggtcgggcgaactggctgccttcatgcggctttgattctcctcatacagacgcatcataccgcgaccagtgaaatgaagagcatacatagatgccaaaagtggaagcaagcgcacctggaccatcttatagttcagtacttgggtctcacccgcgttcgggtccgaatcgcgatcctggaactgcctccgaaccgcacagtaacgggtcgcgatagtcacaccgcgagccagaacaccaccggcatctagaacaatgttggcgcgcacccaggtcatagtaccaaagacaagagatggcacagcaggcttagtatagcggttcgtctctttgtcgacctgacagaagcgggccagcatgttcacatggggtatcttgacgttgttgaacagcaggaaaccattatccatagtgctaagtagtcattagtgctgataccggccaaaaaatgagagccgacttacttgtagccaaatttggggccaatatcgcccacatatacattatccaatggttgatgggtttcgaggtcacggacctgcacgatgaatgggtgaggaccatagttcttgccatcaataaaaagctgggccataaccacagcgtgattggccgtgcgaccgagagatccaatccaccacttcgaagaagtcaatgttggagagttgatggtgaatgtcttatcgtcggagttccaggtggcggtggtttccaaaccgcgcacgttcgatccatggcccagctctgtttgcgcgtagcaaccgataatctcgtatttttctgcgcgttcaaggaacagcttgcgctgctcaggagttccttgctcgcgaagagtcacctagataacgaccaaagtggttagtttagttggagagttggattattgacaagggtctaattcacttactaggaacatactagcgtgcaaaccgtaaggggtaggttcaccaatcaagtcattagccgcatggagctcttccatcgaccatttgtgctcttcggcaagctgctggaggcgcttggccttgcccagcgatcgctggagccgctctacgcggcccaaagtatggttctgagacttatcaaatactttctcgggcttcaaaagagctaggatggacgctcgtcgctccaaagtttcctttgtgtgtagcaactcggataatctttcgacgttgacattcgattgagcacgctcttgctggaggagctcagatccttgcggacctgccggcttcagggctttaacccaatcaggaggaggtgacggcattgtgaaaaaaacgggatatattgggatagatgaaagagagaggatggggaaagatggggttatgaaccccagaaagaaggagaaaggttagaaggttagaagggccgaggatctcaatcgggaaagagcctcggcttaggagggctgaccaatcagggaagcgcagctcggaaatggccccggggaacttcatttcccgacctcgggagggtcgactccctaatttaccacttcccttatgtatggaggccacaaaattatacacaattactaactaccggtggttcattccgcaggattccccccgcataatggactcgttttgatatggggaagcggggagagaatacatacttttgacggctctcacggttcaactagtcccgagatcagcccgatcatcgggtattagaacggcttacgggttctgggaaatgacctaatgttttgcctcagctatgctcacgtgttaccaaaaatatccccggatcatgcggtcaatttatttgagcgaaggaaaaaaggaaaaaagaaaagagtcacgtggaacggggtacaacatatgatgttgtacgggatgagcgaaaagtccgaattatcggatctgataacaaaaagttcccgcgtcattctcacatgtcaaatgtaccaacatgtgagagtttttgtctattcattgcgcctgaccttggacacccgcggcaatcctagccacgtaatcagaatcgcaccggatagggcaatgataaatggctgcagcactttcactcccttggcttgtgcaagcacaccaacagcaaaagggagaatagcggccccgctacctccgaaggcagcgacaaatcctattgaggtaacatgcagatgccgaggaagaagcttcgtaatcattaccactgctccggggaaaaggggccccagaaagaagccttgcaaagacactgccacggccgatgcataaaattggggcacaagccatagaaccaaagcaaatcccatggagcaaactatgtaaacctggtgggaatcagtctcgttatatcgcaagacagcgcgatgctcaccgaaattgcgactttctcgccgacccggggcgtcacaaaccctaacattactcgcccaatcgtgatacccaaccagaacccagtagctgtcataccgctagcaaaagcgctaccttgccggactcgaatcataaaagtaacaatccaccctcccagcgcgacttctactccaacatatcccagcaagaacaatgcacagagccaagtcacccgagcagctgggcgcttgaagattgcatccctcaagccaccctttttgttctcgtccgctgatggtacattcaatgcacggtaatcggcagcagttgatttccagaagcatgcgccagaaaataccagttcgatggccgcacatccgatctaatcgattaaacagtggtcaaatagctgcgaggaagttcagcacttaccatgacataataaaagtaataccacggcagaccacccttggcaatcattgacgttgcgaccaacggccccagaactgccccggctccatagatcccatgtaacacccccaacacctcatttgcattggccatgttaccaatccatgcattccacgcagaatcctctaggccatttcccaaacctgcaaagacgaatgcgaccactattaccggataaggtggatgaacgcagttaataatataggcaatgagatgagacgctggtccgataatggccacaccgcgttgacctagcatatagtggatgcggtgattgagaaaagcggcggccgtatagcctactagaggtgacaagaaaatgagagacacaatcgtgtacgatagatggtagtatgattccagctgtatgctggatgagatagattctagttaattgtagggaattcaacttacgtatggaattagagcctgcgaacggttagtagatagctcaccaaattgagaccacactgtctccttttgggcaatatcaacttacaccatatgctgcgtcattcgcacccatcacgaggaatgaccagaaagttgcaaaggttcgatgaatattcacgcgaggctggttccatttctctaacaacggaaattcagggcccacgggtgaacctgtatttgactggccatgaggcaacgcctcgagagcgataaggctcgcatcgcgcggattttggatcatacagtcagttgccatagcgcgtaattcagtgctgtaagaatttttgggcaagcagaacaaaaaagcagccataaaagtccgcaaaaagccttggcgcggtggttcaacccgcattgccggattgagatgaggggatagtgaggcgtagtgtagttaccccacattgcttcggtagaacttcggatgaggatgctactgaacgggttatcagccaccatttccggttacgttccgacaatggttgcgcttgttatttgtatgcgttaagaggtcatgcactagcagatgatttctgatagatcaactccatcatcaacgacttattgtgaaaagctaagtgctgtactaagaacaccccaagattgaagctctcacatagcgtccgtggtcgcttgggaccccatcgagtacttcgtccatttcctcaataacttctatgcattaaatttgatatccttacgaagaataaaagcattggatcgttgaaacatccctcgaattctaccatcagcacttcaagacgctctcctctgcaatacgaactcgcgcagtatttggattctacgggggttgtttttccaccaatcagaatatgttcatttccttataacccaacccaatgctgcgatcaaatcaacatattctaacagcaatgagttacattaatcccataatcccgggatttaaccctgacccatccattattcgtgtcgataaagactttttcttggtcacctccacctttgaatacttccctggagttcccatttaccacagccaggacttgattcaatggacattgatcggtcatgcgttgacacggcccagtcagcttcaaattcatacgccagagccgggaggaggcgtatgggcaaccacaattcgttatcacggaggtgtttactatgtcatcgctgcgagctttcagcgttatcgtcctcaacaggatgaccgagtttggccacaagggttttatgttaagacgaccgatatatggaatgagaagacatggtctgatccagtctattttgatcaagttgggtttgaccaagatgtgagtttgaagcaatggtatcaccacatgcatacatcacgagaatgacaattgaatactacagcttttctgggatgacgatgaaaccgtatatttatcggccacctacagaaagcttcagccaagtgcaggtgctaagctgaaagactttgcgattcatatatgtactgttgatctggccaccgggcattctacatctgagcctaaattgatccgggaatcttgttctggtgttgccgagggatcacatattttcaagcgcggtcgttattggtatttgtttacagcagagggaggtactgaaagcggtcatagcgaatgggtgaaccgcagcgaggtcggtccattaggaccgtgggaactggggccaaataatcctctctggcgcaatggcgttgaggacgaagtgcaaaacaccgggcatgccgatctggtcgaggacaccaaagggcaatggtgggcagtccttctcggtgttcgtccttcaagacagggagatacgtgggaagagtcagtgctaggtatgacctctcaaagtatcagttagttatcatactaaccttcccaggccgagagacatttctagttcctttggaatggaaagacgattggcctgtgatcaatggaggacagaaaatcagtctcgactcctacggacctggtctgtacaaattccacaccccagtttcctggagagatgaattttcagatccgcaactgcaagttggatggtatcgaaaaagtgagatccgaagaacgaacccgcctgatcccatctgactataaaacagacacgccctttgtaaaagactactcacttactgagcggcccaatcaccttcgtcttcacggcggaccctataacctgtcagtgccggccagcccaactatgttccttcgcaagcaaacccaccagctctgcaggtgggaaacaaagctctcctttcagccgatgatagacgaaaccgaggctgggactgtggtgtggttaaactattttacctatagcagcatcggtatcaggaaggatagcaagggccgttttatccgttttcgaccatcagagggcgacgtcgtggaacatagattggatataaaaactgatgtcactctcacggttgactgtggcaccgagtatcgatttgggtactgcgaaagcacagaatctgacatccattggatcgggtcagtttctaatagtgctgctatggcagcacctccggttggggctaattttactggaatgatgctaggtctatatgcatttggagagcgccagagatgcctggccccagctgattttgcgtacgcagagttcagataagtcaaccctataggaaattgttgatgctttgtgttaaataatccttttgtttctcctccatcttctttcaataccgtaagctagtttatgcaattgtatttctccttagttagttaccttctttccccttacctaagaagaataggtagttcgtgagcggatccatcgggtctagaagatcagtcgacaccattccggaggatctccgacgaaatatagcagctttccaattctacccgttatttggctacgcgtaacttacttcggaggcatggtagtcggcttggtattagaagcatccggggcccgggcagtgtactaggctgcatgtgaatattacccttgagcttttcaacttcagatctgctattccacgctcacatctagaacttctcaacgtcgcgtgagagtttgcatttccttctgtcagggttgtcactgagattcgaggcatgtgtcttcaatttatatgggtttgcaaatcgcgcctactacctgcgatttgggttgtaaggttagatatatcctttcagtttggtttcttattctatgcgtactctctcagcatagtcaagaccgcccctaatcacggccaggtcgccaccccgagttaacataatatctctctttgccaaaccacaaacgacgtccctcttcccagagaaccaatcgtatgggacgaaaaactgctcgaagaccttgatcgtcaggggatctttgcgttgcgcgatctctaacccactctcgttgagatcaacagagcatacccaagaagaccgattaaggaatacgagtttccttgattcgtcaattccgatgacatgggcaacgcttagtccgaatgctgtcatccgtgaacgaagcggagcggccgaactcaatgttttgaccattttctccccctcttcatccgtgacaagtggatcgaacgccggtacagcatctaattgcttcccttgcaagaagctgctatctctgttttcgatgacaaggtggtttaaatcaattatcgtaattctgttggagtcgacggagctgttcggctgtaacaagtctagcataattctttgtttttggccgaccgaatagaggatcgcgcttttgagctctgccatgtcatttttcagcgataatgcaacgcatgaaaattcagaccagtcactccaggagtaggcgcagactttggtgttgtcgatacagacaatgtgtagagaggattctggatgggggagccatttgcggattccgggaatttgtggatatgttcgctctgtcacacacttaccgctgtccaagctgaacaggtgatcagactcacgagtcgatactaggaacttcgccgccatttcccctactagcacatctatgattgccttctcggagtcgaggcgggatttgaagagtaccgtcaaatcactaagccagcctttgtctgctgacttctgcattctgtgtaggaagatcatgttggaggcatcgacactaaggagcgcgtctctccgttcaatccagaccaacaggcggactggtgccttatggcagtatagagtcttcaagctcgttgctgttttctgttcgtacagtacgacagatccatcatcctttccgcaaaagataacttcagacgtgtgatggaccaccatggcagtgatcttcgctttggcttccacggaaaccgtctcgaccactgtagtgaaagtggtcccgctgctgtcatcgctcaaggtctcccgcaacagagtttcaggttcccacacattgcactgggcgcctcgtatatcggcaaaaagcatactgtccctggcaaaggcaagctgcttgatgaatgagttggatgacttgacccgatacaggagcttgaagatatcaaattcataaacgtggataatcccgtttgcaccacccgctgcgaggagacacccattgggacttggagcgagggtttggcaattggcacgaaaacattccagctgccgatcggcaaaggggtcaaggagggcaagatcaccatcgaggtacactactgcgagaagactaatgtcaggattggggttgaaagcaagcgcaacgacaacaacatccgtgcaggtttctccgctggatagtttcttgccacagttaccagcgtaggcgtcctcttccatgtcccacagcacaatgggttggcggctgtaagcgacggcaagcattccgtgggtggtagagagagccagtgcgcatggggtcccacgcggaggcgttcggttcgtctctagcgtatcggtatcgctccatggcctccgcaccgattccggctgggcgccgtgtcccaaatcccaagccgcgacataattgttgcgactcacaattaaaagcgtacttccatcgaattccatccccaccggactgggagggctcgcgatgctgtgcaccacttgcccacttctgatatcccagaccttggccattttcataccacaagttgctacgaggtcagttttgggtttgaaagcaatgaatttgactgcttcaccgtgctccaagaccttgtactcctggtacgatgtggcatgatacaatatgacagttcctgaactgagaccgacggccaggaactcgtctccatagcgcaaggccctaggttgaccttgacggaaatcgatgcacagcagcctgtcatcccattgcttgttaggtgtgccaggcacttcgagcctccggcctgagcgcccagtgttctataccatagactcggtgggacagaatggaggtaccaacgagtatattgctgacggtgatatcgtgagcgcgttggcaaacatggcaggaatccgagcaaggtccgttgtccactgtcgtagtgcttgtaaccgagggtccagtggtgaacgctcaatggcacatgcattgacgtagatcttgagatgatttgaggcgcggataaggtgattaagacttttcgagtcagcaatcgtttcaatccaagtgaggacattggatctgaagaactgcacggcaagctggaatgtccctgccgccaacgggtcagacctcgagagatgataggagtatgctgtgtatgcataggcggcgaaatctaatcttgctgctggcaaacgtgccgaaggacggcgtcggctgctcctcggaggcttcatttcttccccgacaaggtagttgagacacacccgagccatccgtgtgtgtgcttgagttttttcgacaaagaattcggactcaagtccgccggttacaaggaattgcctggcagtttcatgcaccatattaactctcccatatttgtccacgaccaccagttcaccacaaagcgtggtgatactctcctccaaccttgggaatgagtcgtgggtgtctaaggtcagagcaccatctagttcactgattgtcattggtcgaattgcgcatactgtccacataagaataattttggccagctcttttcctcgagcagcctgcgacatataatccaaagtccgcttatatagtgactccatgcctctgggcacgtcttcaagaatctggtaaatttccctcctgctgtggcagcgtataagttcttcgagcactaaaattgtccacaagaaggaccccatagatttgtctagtatcttctcggctaatgtacctcgatcatcaggtccgacgacccctaaggccttggttctattcttaaccaaaagactgagatctgactctgtgtctattatcgagattggcaaggactggaccaggtcgggtgcaatgaacgagagaccttggtccagatcgaccgtatacgacttgtgatgagaattctcaggggtatagattcgtccatgttggaaataatggcatataaaaggaccggaggattgaaacactcgtctagggcgtcgatgacccagaaatgccgagtcattgtggcctggaaaatgccagaaaggaagaggattctccagagggtatgttcgtcgacacgatctaagcaaacaccatccgcctgtattcctagaatcgcatcactagcttcgctattagagctagccatctgaaaagccagagatcggagacaacaacctaggttggacttcgacttgtctccatgtttgaagaaaaagtagctgcatgtctggccagagtccttgagctgatcgatgacatagccagcgagaacagattttccagttgctggcttgctctttatccatagtgtcctgtcatttccggattccccatctctccatttgacgtgactggctttggtcgaaatccatccgcaggtcccatgcatccgagcttcgcagacatttgtaagatcattgtctaagatgtcgggaactttcaggtacttcttgagatttttgattctctcacgcctctgcttcagtttcagctccggaattgccgcggtaattttgttcacagtagaggcgagcgcgtttcggaggacggcatagttggggtctgcaggtgtgtcaaacttgcatatcgagcggtggtcagcagtcatgggtatctgctgctcttcacggtacccgaggacggccgactcgggatcgacgatgagtgagctaaacattttcatattctacgtttcgtagaacgaccagagctcaaggccggccgaaaaatgtcgaaatccgtcattgattacttggactgccccagaatttggttccagatcgccaacataagcacggtcgtatgcaaccttgaggaggttcttcagaatctttgccgaatcggcacctcgatgcggcgtggcgagaaaatagaatgcggcgaatcgcccagccagcgccttgtacacttcgtcttgtttagccaggatatatgctttctttatcactaagccacccttgctgtggccgatgacaacgatgtgtgttccagaattgagaatgcatggcgaagtgctgatcgcacctaggaatgacttgctaatgtggtgtatattcaagcagtcctcttttcctttcaagtagtacgaatcgtatccatagctatgaatgcggacgttcttgaatgcgggatctttggagagccactcccttggccagaaattataccgcagagacgatttggtccatgtttttctagaattaccgcctaggccatggacgaagatgaagtcgatctccggtgccgtcggggaatataggagactcagtccaagagggccttttacgctctccgcttgaccgtccgatgtgtttgacgtcctgggcagggcctttgacagagaaaacaggctcctcgagctcttagtcgagtcgcgactacttgagggactgtcgggatatagttcgggctttgcgtgccgctgctttcgaaagaactggtacagtcagcgatctggtaagagggaagtttcccaggaggccaaggaggtgagagtcaaccattgtagaccaaaaaatcccagtgcgtacggcgtcaatccggtcgctcggacttcaagaacggtctgccaatcaagagaataatagaataatggttcaatgggagttgtttcaggagagactcttggtaatgcccaacaccttggaattgaagcacgtaatatgtacctacccctccttcgaaccaccaatcagccagttgtcttaaccgctcgtcaacgacccccgccgactcgggaaagataacggtaggtatttacccagaaactcactccctttcacctctaactttgacatttcttgaggatgctgtgctgatttggcgcataaaagggattgttcacgcattgtatattatttcagagccatatactatgggttcaatgcatccaaccttcgcagttggggaccatgaggctttcatagaattcgctctcaggtacaaaaatcaccgccagctgcaaacaaattctgcgtcggagccatacttgtcgacggcgctaacggcaagatgctatcaacagggcactcgcttgaatacccgcgagattacaatgaagatctaggcaccacgcacgcagagcagtgttgtttcatcaagatcgccgatgaatacaaccttcccgaggaacgcatccacgaggtccttccggctaacacagtgctgtacacgaccatggagccatgcaacgaaagacttagcggcaatatgacctgcgcgaccaggatcttgaggcttaggagcgccatcaagacggtctacgttaaaatcaaagagccagggacatttattccgcacaatgatggacagcaaaggttggaggcaaacggggtcaaggtcgtgttccctgttgaacattggcatgataggatcatcaaggtctcaatgactggacattgaagactgagtttggagtagcgaagaaaggttgcggaaacacccggacggcccgagtcgccacgtggctctggacccttctttaccttctttgcttgtgtacagtgcttcgtcagtcttatttctgatttcttcgagattttataaatagatggtggcctagctggattgaatcaagtcatgctttaccccttcacgccgtcgctctcgcagacataggcagggggatactacaatgtagtcagcacagcgagatgcacatgtggatacacatacaagtggaactcgcaagcaagtggccaacacaactgagaatttcatacggagtacataaatgggagttgacccctcgggacgatagttatctggtgaagaggggaccctgtcacgggggacaggggcaccgacagccctgccagcgaaacaggtgtgagagcaaagtcgctcactgggaataataaggtaaaagagaggagagcaccaggggtggctactagaataatggaaagttgaaaggaggttgaaggtatctgcgtgcaataatttctacatcaggggtccttcatagttatcccgacctcgggaggttccgaggtcagcatagccgcttagtcatcctcgtcctctttcttctaaacagccttaactccgtgatccacatcgacaagcctaattggattctgccatcctcaactggcatgtggtggcagctcatcttcaaacctgttaagcaaagcgacaccctagtgcggatagccacaatgaccgaaagctcgactgttgaccaaatccccatctccgatgatgccgagcagaaggcggacaacgggtctgcattgagtgacccgatcgaacgtcgtcggcgacagaatcgcataaaccagagggctcaccgtacgtcactttcgctgcaatctattcaacagaggttaatctttgccgccaatatttgccaggagagcgcaagcgactgtcattaattaaaaacatccaccagaagagcctagtctcatcctcaagttcgacctctaacgtccaaacgcaagaccattcctcgcaagaccgttcttcgcaagacaatccgaaagtcaacttcaaccgcagctccgaatttctacacaacactctggagaaattcgccaagtcagcgtatgagagttacatacgcggggacccgagcactgatcatcttatgaccttgactaaggttaacgtctttcgaggattcatgcaaaatttgcgattagttggttggtcggagtactggatcgaccttgatgtcatttcgccgttcagtatagcttcgccacaaacgccccctcacatggacgataacagcctccttccgatcagcctgcagcccactcgaatccagaaatcgatacaccatcacccgtggttggacttatttcccttacctaagatgcgcgataatctcatcgaagccggggatgaatgggatgatgagcagctctgtcacgatatcatggggttctggggcgattcaacgatggatgcagggctgctagtttggggagacccttggaacgtgcagaactgggaggtgaccgagggatttctgaagaagtggcaatgggttattcgaggatgccccgaattgatgaacgcgacaaatagttggcgtgcccgtcgaggggagagactaatattccgctatgtttgaatcaacataatttaaactgggaaccagctttagcaatttactgagcagactaatattaaggggaggggttgttgcattattgtaaactaggggctatctatcagaaagttgtatcgaagagcaagtctataaaataagggacgtgaagccaaacaccaaaagtaacccatgagaacatcagacgtcaagatcatgaaaatagtagtcatgtcacacataaccccgggggctggggacctcatatcggagacctcgggtgagtttgtacttaggtaacatgttctttctcctcctctttaggaattcgcacccaaatcaacgtgatgaatgccgcaaccacttcacatgcaagcccaaaccaccagatggcacggattcctttcaagccgatgtcgccatctggtccctggtcgacttgggtgccgatggcatctgcgaccgctgtcatgattgcggaactcaagttctgcattgtcactagcagactcccagcactgccttgataagagcgacggacattgctggtgatataaattgacgctgctgcaaaagagagatccggaccgaaggtaacgagggccacaccagggaaggacagtgcccagtatgacgtgtttggggtttgtgggaggaagaaaacgggccccaagccaaatgcaaccatcgcagtgaaatagatatagtgacccgggaccacgtgaagagttcgactcaccacccaggtcgcgagcaccccgacaatagcattggggagaaggtagagtgcaaccgtgagaggagtattttgctggattcgtaaccagaactgaaccgcatagaactgccaagcaccctggaagccaccgtagccgatgaagtaggcaatcattaatggtgtaaagcctttcgtcttccagagcccattgggaatcagaggtcgctccacccagtgttcgatgaagaaaaacgcgataatcagaacaacgccgactgcaatcaaggcgtacgtgtagggcggccacattttcacagcgccttgagtcaacccgaacagcacacagatacagccgattgcaatgaagccagcgccaaggaaatcgaattggcgaatgcttggtacatcggctccgacaatgtcagcaactggaaggagagagggcatggtaaaccaggctgcaagaagacatagagcacagataatagcattggaaccgaagatccagtacagataagatttcagagcaccgccctgaatcccacctaaccaaaatccaaagggcgaggttgctgacattgcagaaaagactcgattcttccgaaggcctggcttgtatacgcgaccaaggatgctcatggacccagaaaccaatacccccacggagatcccctgcattgcacgtacaacatagaacagaatcgccgtcttggggtggattgagaagacacccacaatgttccaaatagttagccaaacgaaagccccgatcattaaggacctcggaggtgtcaagtcactcaatgagccggatatgaccacagagagactaagtggaagtgtgaaagaaccgagtagccagggaagctcgctgttgcgaattccaagagctcctttgaactcttcttgggtgactgtgatatcggcgaggaaaaacgaaaacagtagcaggccagccgaacaaacaagaacgaaaatcacctctgccgttaagctaccgagttcaggaggaacaccctgggactttgactcagatggagagccagcttcctcttgtagatcgggcaaccgagacgaacggcgcgttccgattcgttccatgcgggtagagggcacagtattgagttgatagtcgtcatccccatgtcggtcagtgatggaaagtgtccgcgatagattttccagagcttctcccatgtgcgagtcccttcgggttctcgtagtaggcactgtgtacaattcggggacatcttgagactcctcggggtgagaggagacggatctccgcctggtcgtctcatgagttgttgctggcgtgagactcgaactgaaagttcccaatttgtcttcttcaacgcgaaagcctttcttgacgctagcattatcggaatctagatgtgtcgatggcatattgtctcagacactcggattcgagcgtcttcatatatgactgtcgaggtatgggagacaaacaaaaggagcaatttgaaaaaagatcggaggggtatttttttctggtgaattgtcaatttgtgtgtggggacggggacgtccaacgtgattagcagcgaatttaaggtggtggaatgcggaaaccagaatccgtgagcagaagactattgatcgaaattttcaccaggctcaggtgatttgatatgtttggagggctggccctcgacaactcttaggcgagcgtggcctccaaaactttcgggcgattttgatgatcgggacgctttgggcgggcgcgaaggcacatattttgttggactggtctgatatcatcgagaacttgttgagaaacattcgaaatgcttcccaatatccatttttaaatggaacttgaagctgggggactgtgaaaacaatcgagtgacgtcttttgatctgataaattaagcatacagtattgccgcgtttagccgtttaccagattcatgtttttatatcatccccggctggcgtaagcgcggggataaactacattaggatacaaggataatgtttttttattcaacccctatgaatttgttgaatcgatatactcatattccaatgctcggtagctgcctggttctactgacatttaatcagtgctgttattgttgtgggtgatgacattcacattaaattagttgaggtgccgtgacaaaaatattttgcgcaagctcatgccttcaattacagtttctcctttcttccccatagctccaaccattctttaaccgaagcaccagatctaaccagctcattcatgcatatattgcgcacatagtcacatcgaattaccttcatggcgttacggacattgtggggtgagggagattccagggccttggccacccaatggccgtcatgtgcgtctaatgctagcacgataggatacgtcatctcgcggttgtgcaagtcttcggctgtagagcctttcagctttgcatactccgaagaataaacatttttacagtcattttggagctgcgaatgccagctatataaacgtcaaacctaaatcctagcatgtatctctaggaagggaccgacttacgcaaccgtagttaaagtttcatccatggaatcattctctaggacaaggtggcctagtaaacggaataatgaaccggtcttgagagaggccattcttcgatatgccgcaattctgtccgcagtggcagtagggaacgcacggattccatccctgcgccaaactagggatatatcttgaccttcaaggatatcctggagatcctgcatcagccatggggcgagattggggaagtccttcgttgttttgttgagaatctgggtgactctgtagtaggcgcggtttgctgtttcggatgggccgtatatattgtgagcagtgggtcgtcctttgcggtaatcgcttccgtcggagatctaagaaaatctctgtcagatggtttatcttaagccatatcaaagaaagtgggaagagggctttaggcactcacatcatcaaccagcattaggcagaggtgtatagcatccataatctccaacaccatccggtacttaggaggatcatcattatgaagggagggggatagcttgtgaacaaacgctatccaatgatgcttgccgtagacttcacgaagatattcataagggcattcaagtttagtaattctcttgggattctttcgtccgaccaggtgggcttttttgtcccaccaccgagggatgtgaatatgatcaacaattagatataggaagccgctcacaacaaccatacccaggacagggctgatccgaagaaaaaaattgaacaggctttcaaatagactcataatgtaaaatggatatgaatcgacttgcaataacgaagagagcaggatatgtgaaagaataatcaacgttcaaacatctatacttcgaagaattccttaaatgctagtcctcctgcccagaaaagtaacaagcaaaatgctagattcacaactgacgtcgcattctctgcacatactctggtgttatctcgtttacgcataccagatatatcttagtcgacggcgagtctatgagatttctgcaggtcaacttcaaacatagcgagtagaaacgaagaattactgtttccggggttccgaaatgttgcatatatacctgtggcaacttttccctgtctaaatatgcatgtaggagttgcattagggtgaaacggggtttattttcgcattttgcagggaatatgaacacctgcattatacaatatgattgtatatcccgattgcgataatgcaccgcaaacattgaaattgctttttgagtaatatacgttattcagatccttcaaatgtaggtcagatctacggtcattttcatcataatactgcctcatattctgccctactaagcacagaagaaatacatgtaattgagagcaggatgacaggggtttctttatcttacacggggagttaattaataaataatggcaacgctaaatgataccatggaccgagaatcccgtcatgcacacttatgacttacgcaggtggcatttgagggctgacattttctatcttattcatgtatatgtgttagttgcaattaaatttgaactcatgcataatcacccagttttgaataacagggctcggagaacgcgctcatcaaggaagctgtcacggtatctctacctatgctgaacctatatataggcgttgatttgaggggccttgattccgcactcagaattatttgattctttctttttgatctgcaaaattgccacaatggacggattcgacccctcccaagctccgatagagtaccaagctgtgaagcctctcgccgatttattcctcctcggagctgcacttgggtgggtgaccaattatgtcgggatggtctacacgtcgttcaatgaagagacctatgcaatgtcaattttggcactttgttgcaactttgcatgggagattgtctataccttgatttatccctccaaaaatcggcttgaacgaggagtattattcctagcgatgatcatcaactttggcattatgtatgccgcagtcatcttctcgccacgagaatggacccacgcgccactggtcgagcagaacctccattggatcttctccatcggaatcatcggattcctcactgggcacctcgctctcgctgcagaaatcggcgctgcgttggcgtacacctggggcgcggttgtggcccagctgctgctaagcgttggcggtatctgtcagcttctctgtcgtggaagtacccgtggtgcttcctacgctctatggtatgcagtcccacattttagatatgtctttcatataatattattgtctgaaagagtatcgataatcgattgaaaagcttacgctgacatattttaggttttcccgcttctttggatcgtgcagcgcgatggggttcgcagttctgcgttggatgtattggccggaatcatttgcatggcttagcagtccccttatactgtggagtgtggctgtcttcctaatcgttgatggcttttatgggctatgttactggtatgttaagcggtatgaaaagagttttggtacggcacgaacagaaaaggtcaaatgatctgtgaagaatgaggacagtatcatatcgatggctacattattggaagaaaatctgcagaagataagatattgaaacgaatgaattgcttttgtttgaatatctcacaatgtcacagtactatactgtggataatgctgcagtaagatatgtatcgttcaatatatgtagccctcttcaaaatgccatcaggtaaatttcaaagatatcctacccggcctcccatctacgtagacaggagagagtctcaagaatacgcacaggaaacccttcgtgttccatatctatccaagtcagtggtatttatttcgagtaagtaacaggagtctacctcagcaggtgccctctgtctaaataccagaatgagcaagtcagagttccaagtaatcattgtcggcggatcaatcggaggcttgactctggcacattgcctacaacgcgccgggattgaccatgttgtccttgagaaagcgggcaatccagcaccccaaattggggcatcgatcggcattttcccaaatggagctctcattcttgatcaactccaactgtatgagttggtcgagaaacacattgagcatctgagcatagcaaccatccgctatcccgacggttacagctttcaaagctcttttcccaaggtcctaagtgaaaggttagtcttagttcctcccattattcccgtggaagtatctttaaaagtatctttatggttctgatggcactgcacaggttcggttacccgatcgcattcctagatcgacagaagatgcttgaaatcctctaccacggctacccagatcatcagaaaatctgcctggacgaaagagtgacaaaaattgaaccttgtggtgatacggttatagtgagcacgggcaacggctctgtctatcgagggcaccttgtcgtcggcgcagatggcgtccacagcaaagttcggcaggaaatctggaacgcggttgagaaggctggctcgggagcggcaattgagagattcggtaagtaacaatgagctgtattattctctgatttatatgggaactgaacgctgcacaggtctcacggcggaatttcgctgcatcttcggcatctcctcccccatccaaggattgattataggagagcaggtgaatgcattatttgatggtttgaccatcattacgatccatggaaaaaatgggcgcgtgtattggttcgtcatacagaagttggatcagaaatatacttacccgaactgccctcgctacatgacaggcgacattgaaattgcagcagaggaactgagaagtatagtattctacaaagacctcgagtttgggcaactgtgggagaatcgtgagacagcctccatgaccgtcttggaggaacacatctttgaaacctggcatcatgaccggctagttcttctgggcgacagtgctcacaagataactcctaatatcggacagggcgccaatatggcaatagaggatgccgcagctctggcaaatctactgcaaagattacggaagggctcgggaagttggcctcccacagatggacaggtggaggctcttttgaatcaatatcgcaatattcgccatggccgcgtcaagtcagtctacaaaagctcccgctttttggtccgcctacatgctcgagatagcttacttaagactcttcttggtcgatactgtgtaccatatgccggcgacttgccggcgtatatcggatccaaatctattgccgacggggtgatgtgtgatttcctgcctcccccaaagcgtggtggaggcgggtgggagagatatcggactaaggacttgaattgggggtggattcaagctaccttgtatatcatcatctttactgttctgtatacatctatcaaccggtattggggtatggcggtcgagataaattgattttgatagggtatagcagaactacccgcaggcggtagagcacaataagccaataagatagcacgaaggcggtgtatgtaacgactatccttggaaccttagaactcagttcaaaaaaaatgaagctattcccaccatacaaatctccgcatacaccgaattctaggcgttgaagcaattgcgaccgtataagtgatttgtggggtggggatagctttaattcaatggtttatatagtcggggatagtttttagcgctagggattcgaagaaattgatgttttgtcgggtgggaataacttcaatttacagtacacgggagagcggtgtcgaaggcggtctaaaattcaggcatattcaggcaccaaccccgcaaaactaggcagaaaccacagtctcccacttaaagcacgtgaaatctccacccaaccggtggagataagatagactatcagtcatgtgatttgggtgggccaccagttgggtgaactgccccctgtcgcggtttgctgcgggccacaatcgttgcgccatcctcagctgaagatcgcatgatatgggcctacatcttccgcgtcataatccacggtttaacatgtttcatgccgggaaccgcgtatcaagtacatcgaggtggtatgcacaaatccctcaagtgcccgacaaagaatcagcttcttttctgtatagagaacatccatcgatcgcatatgccaggccagtttgctaggatcatggggcgatcggaccgtacggggatgcctagcgttgatggtgacacgggtcatgctccataaggatgtggatagacattatgaaattaactgcattatattgcttggacttgtcagactatctaaactgtgcggggaggtctgagatctatttggggcgcatattgacgaataatttcaggtgatatcgtcgaagtttcatggcattctacgtgttgtgcgcgtttacccgggcgaaaatatatcgatatggttccggtattagcaatcccaaggatgttggacctgatatgcatctaatatgcatgctcacatgcatgctcctccatattcattaggatgagatccacaattgatcgtacgtccgattcggtccgcttcgccggaactgattctcgtttgatgagtggttcctttaagattcctcgtctctgtacctcctcagtcgtgttataaatcatgaccaccattatgatttcccatcggagatccatgcggttctttctcgagtttgcatttatcgcatagggatgtctacatcttgcttcttggctgcacttggccccacgcctccagtcatgcacctgaattttgcatgaagcctccaagagagcagaagttctccgaccttccggggagcctgtactgacgtatgacgtaaaagagagtttgtgatatgaagggttgattttctcgcaaaaaaggcgaagggttgtttagaactttcttgaaagacattgaatggaaacatgctcggcctaacaacagcaaagatattcgcttttatttcctattttctttccccgataacattcttcaccaataataaagcggcttcgacatatcaccataggaggccggatctccgaagcttccaaatacgccacgcccagacaaatcatacacaacaaaagttccagtcaaatgatgaaagcgatagtggagctcgcgagatcaccgagccgtatgagaaggtatgatagggccttgcttctgaaaccgcattatctaacctccctaaacttcagattgtgtgcgctccattagaatacctgctctctattccagggaaagatatccggggcaaattgatatcagctttcaatgaatggctccatctgccggatgataaattggccattgtgaaagaagtgattgatcggctgcatacagcatcgctactgtgagttcaatcgggttgtactagaagccgcgctaaaacctatgcaggatagatgatattcaggacgcatctcatctccgtcggggacatcctgtggctcatgatgtctttggaatcgcccaaaccatcaatgcagccaactatgcatactttctacaacagaaaaggttgagtgagataaatgacccgcgcgcatttcctattttcactcaagcgctcttggatctgcacgtaggccaagggatggacctctactggcgtgacgcgctggtgtgccccacggaagcggaatacacccgtatggttatgtataaaaccggtggattgtttcgacttgcagtagaattgatgcaaattcaaagcactacaactacgtatgattagctcagtcgtacaatcccgaaactcttagctgacttgatctagggacctttcccgactcgtggagctattgggaatcatcttccagatccgggatgactatatgaatctgcagagcgggatttatgcaaagaaaaaaggattgatggaggacttaacagagggaaagttttcctatcctgtgattcatagcatccgtgcggttccaggcaacatgcaactcatcaatattctcaaacaacgcagtgaagacagagcagtcaaagtccgtgccgtgcagtacatggagtcaaccgggagttttcagtactgccgggaggtattgggagggttgatggagcaggcacgaagccatgttgacgagctggagatactcttggggcccaatcagggaattcgtcatattcttgatttacttgaggtctaaccaccagatgtgaatccaggtccatgagtccatgagtccatagttacatcctaaatgaacgcatggggtttttttcccaatcggcgatggtgaaccatggatattgctcatctattagcttacttgtatatccccatcatacagagctcgaagtccttttcgccgaactacctccagagctgcttgtacccacgcaatttcatgaccatgaccagcccgattccgtagactatcaagcacagtcccaagcgcgggactaacaggtaatgggccggctagcagcatgccatctttcagaaattattccacagattggcaaactcgatgtgccatagataagtagtctccacaaaggtcaatgggatttgatgtactcatcacttccgaagcagaaccttgatctaactcggtctcaagagccacccagctgaacttctcaaggtttgtgatcctttccaagtgctggtacatattggaaagactcgaccagagcatcgttcgcgttgcccataggagtatcagcgtagcagcgatctgggcgttttggaaacagagaacgactgggaacagattgctatcaggcgggatattacgggatatgcataatgtcaatactcgtacacggccatgatccgcacaacctatcaactacatattcacatagaaagcgacattggaatgaaagaaagtcgtattgctcatcttcgcaagcggagatatcgtttctttgtattttccccgcatttttgtgatcacgaaaccatttccggatctccacatgttaccaggaatcccttaccgagcattccgaaattccgagcatgtacgtactggtataagttggctgggagctgcaggtccccgggaaaaattaataaaaccctaacttcccttgtcatgtctcactctcatccacttagtattctctccatcgaggagaccaatttggcccgtgatgtggtcaaagctgctcacccaaacgtcgtgatcgactttcgggagatcttcctacaagaaccacccaaagctcagctccaggaatttctagctcttgaacatgccggccgcttaagcccaactaccccacggcctccacgtctcgctctatgccaatatgacgtgatcggggtggaccgcattcctcagttccacgaatctgtgatcgacgtggtttcacagtcacgagtgaaacacacggtggtggggagggaacatcatgccagtttgactctgtaagaaataattatagttgaacatccggagttttctaacagttgactaggagcgaatttgatgttctcgtcgataaatgcatgacatcaccattgttccagaaagcattgtcggaattcgatctccctgaagggttcgaggtcgtgattgagccatggccatatggtggcttggatcatacagatgaaaatcgtcgttttttccagggcctttgtttcgcccaggataaacgttctggcaatgaagactccaatttctattcgttccccttgcccattatccctgtgatggatgcccacacccaaaagatcacccgggtagatcgacccgccacaggcggcaatggtgatggtctacttgaacagactttcaagcgggatataattggtcattgcaagtcctccgaatacgtgccagagctgttgcccgaggggacccgcaaggatctcaaaccactgaatgtggtccagcctgagggtccgtccttccgagtcaccaacgagtctctggttgaatggcagaagtggcggtttcgtgttgcttttaatccgcgagagggtgcgaccattcacgatgtctcgtatgatggtcgtagcgtgatgcaccggctggcaatcagcgaaatggtaaattatatgctatcccaaacatatagctgggaactaattgtgcttcgcttgcttagaccgttccgtatgccgaccctcgaccccctttccatcggaaacaggcctttgactttggcgatggcggcggcggaaacatggctaacaacctctcactgggctgtgactgtctcggggtcattaaatatttcgacgccattgtcacccgggaagacggcaccgcccaaacccttccgaatgtgatttgtctccacgaacaggacaatggaattggatggaagcattccaactggcgtaccgggcgcgctgtcgtcacgcggaaccgggagcttgttgtccagtttattatcacactggccaactatgaatatatctttgcctataaattcgatcagtcgggtgggatcacagtcgaggcacgcgcaacaggtatattgaacgtggtcaatatcgacgctggtaaggtcagtgaatatggaaatgtggtgagcggtggtgttctcgctcagaaccaccagcacattttcaatatacgaatggatccagctatcgacggccccaacaactcagtggtcgtagaggaatctcactcagttccaatgaatgcggtgaccaaccccaatgggaacttctataaagtcaccaagcagaccatggagcgtgcatcttggatcgatgccgctccgcagctcaatcggaccatcaagatgatcaatccccacataacgaatcctatcagtggaaaccccgtgggatacaaattcattccactagccactcagactctattggccgatcctgcatcggtgcaggcgcgccgggctcaatttgctcaacaccacgtttgggtcacgaagtaccgcgacggggagctctatgctggaggtcgttatactttgcagagccaaacagaagtcgaaggtgtctctgatgctgtccttcgaggtgactctgttgttgacaccgacgtggtggtttggcactcctttggcattacccacaatcctcgtgtggaagattggcccgtgatgtatgttgatcgcatttttcttcttttcattctttcttcttcttttcattctaactcaataggcccgtcgagattttccagctcatgatccggcctgcggacttttttgtcgccaacccatcgctcgatgttccttccaacaagaatatatcgtcacgtctagctgactcggaatgctgtcgaaagtcgcatatttagctattatttaaaaagaaggacatagagatagagagagttttccctgattcgtgtatttctgcatcggcccgccccgcaatacccacctgtaaacaacatcgtcacagtgattgacctttgcccttgcattatttatgtaaccacaaccacaccaatcgtgccaagcgcccaaaacacaatggtgcgcaccagtcaacgataattttcactcaatgataaattcacgaaatcaggtaccttttatatggtatactaatacaaatagtacctaaagtccaagaatcttaatatcctttttctccaccaccctactaaggtaggggaataggtcttaacacgataattaagacagctttagtttatttgacatctatacggaatatcaggtatacaaaataataggattttcaaatttctgtataatatacatcgtccttctaaatatatttatcaaacttctataggtattaattatttggctttaatttagtgctagaacgacttgaccatgaactattatatattagtactcctatttgtctcttaataaattcaagggttgataaaaatggaaattatgatttttggactttggtaccatttgtattagcatactacgcaggtgtatagcggccaacagtcggatgcctgattttagcataccatacataccggcccgaattttacactgctgtagacatggttcgtcgctcagcaacccatgcccgtacttcccgaagattgcaaaaagttcttcacagtttgaaacggatttgattgaacctcaggtgggatagcgaagctggccgacaatcatctactcatcgaggtattcatcccccaaagacagattccaaggatgagaaagagacatctgagcttcatgcgcatgctgcgtctcaaagtaagttgtactcatcccacggtatttgggatccaacgccgatatcaaccacaacggagtctgctgctgcacgtacttccagccttcgtcaaatatctgaggctgctactcctcagctctcatctaacactttctggccaatgtcacctggtacagtggctggatctgaatctgaagtctgtgaagacctcagcagcttttttgaaatagccggtgaattctactttgaccctcaacctggatcgaatattgccgccggtgcagatgtgggattggcctccagatgacacgcgttcgcccaatgcgctgaacgcctttcatgccgaagatgaagcattgacgagagtcatggctggtttgctgtgaacattgtggaccttgttatgcataacggttcaataaattaagctatgagttcaacgatgagcgacttcggttcggttaaatacattgctatactcgaaattatgaaacatccctcgggtatttgcacttccgtttatccgtcacgaaatgactgttgtttcgaattgggattccccggaacttggcgtgcctttgcctatagttttcggcaattccaccagtcgctctaattcccacgactagttaatttccggaaggattttcttctttccgctttagactcttaccctcaggagcctagtatatttcccctctcttgtgtgttgtatccagactatcggatatgctagctgcagaagaagatctcacccgccggtgggggaaaacctcggatttccacgaatgatgcgtgccctcgccaaatactgtatacaaatatgtccaggcaagcccattaatgaagttttattgctcttcattcaacatacaaatcatctccctcgatgcattttggtaatatcatcaagccagtgcttttcgcggccctcgtgcacggatatgcaaaccctggcagttgttcaggggcgtgcaatgtgcacgacccgtcgttgatacaaagatcatcggacagtcgttatttccgattttccactggcaacaaaatttcttatgccagcgcctcatctatcaacggcccatggactacgattgggtccatcctgcctagtgggtcttctatcgatctcgccggaaatgatgacctatgggtaagcattaccctttccgcaaagcttgtccgcaagtgatcaacatattgggtactgacttccatgctaggctcccgatgcgcagcttgtgaatggtctttactatgtttattactctgtgtcgacgtttggttcacagaattcagcccttggactagccacatctgcaaccatggatttgggctcctggactgaccatggagcaactggtattgcttcgtcatctgccaaggcatataatgctattgatggcaatttgttcaatgctggtggtacttactatatgaatttcggctccttttggcacgatatctaccaggctccaatgaactcggatgccactaaagtcgcgtcttcgtcctacaatctggcttatgactcctctggaacacacgctgtggaggggtcctacatgtataagtatggaaactactactatctcttttactctgccggcatctgttgtggctacgacacatctcgccctgccagcggagcagaatacaagatcaaggtctgccgatcgacctcgcctactagcggatttgtatgttacccaatttcccgctttagacactcgccctaactcttttcctatccaaggttgatgcatcgggcactgcttgcacaagcgggggaggcacagttgttctagaaagccacgggacagtctatggtcctggtggacagtaagtttttgatttcgatcgtattccaaactcgaatattaacctgaccttgctccaggggcgtgtttaccgatcctagcctcggcccagtgctatactaccactatgttgacactactgtaggctatgccgatagtcagaaactctttgggtggaatcagatcgatttctcaagcggatggccagtggtttaagtgtgttggtgcctggtttttcaggccaggtactgttcttcccctttccttcctcttcctctctttgttctttctcctccagtcctctattagcttggaatacgatcgatgggttgactgggcttcttgctttctttcgtgggtaaagtagctttgcttggtttggtacatttgcaaccaaatgcgattgatgtaagtagtacagcattctaccactaaaccatagcgaacaacgggtatctgtttatcacatagggtgtatgctatcatggatttctcaatttgagataattcgttctaaaactgaagtttctaattcaaaaaaagcttacagtatgacacatcccggcgattttcgcactcggccgactggttctgccccaaggggttgccaacaaaatgagtctaaatttcctctcctcaagattattcgaagtattttttgaacttcataaatttcatttgctatggaaaagtcatctaaattaccctgcgccaaaacccaggtgaagtataacgcgggatggagacgcatcgtgcgaaatttcagtccgtcgtatggtctctcccccttcaaaaacgttaccggtttatgctgacagaaatatatagatggttcgcggtaactatgggcactggcattgtttcggtgttgatggtatcgatccctttcgatactccagtgctctattacttgtcgatcgtcttcttcctactcaatgcggtgttatttactctggctttcattacttccgtcctccgatacaccttatatcctgaaatatggcaggtgatgattcaagacccaaccaattcgctcttcttggggacaatcccgatgggcttcgctacactcattgagatgtgggtgttagtttgcgtgccaatctggggcgaatgggccaaaacatttgcatgggctttatggatgatcgacgtggtagcagcggcttctgtgacttcgtccctaaccttcattttgtaggtctacagtcctccacatgccaatttttaagatactgacatccgatcagaatgtctcagcgccatatcacctcgctagatcggttcactgcggtacaattattgccaatcgcagcgactattgtggcagcgggtaccggcgccgaggttgctcttatcttagcagacaagcaccatgcgatgggaacactcctcgcctcatttattctctggggtatgggcactccgatggccattgtggtattggtaatatactatcagcgactagcagtgcataagcttccaccgagggaactgattgtgagctgttttctaccactggggcctcttggctttggtgggttcgggtaagtgtcttgcagatttcccttgggcgccctaagactctgggctaatacgctgtcagcatcgtttacattgggaaggtagcacgggtattgtcgcaggattcccagttcctcgaccctatcgcaggccacattgcatatgtcttgggtgtcttcatatccctcctcatgtggagcttcggcttgatttggctcgtatttgccctagctaccgttctatacagctctccgtttcctttcaacatgggttggtggggatttacgttcccacttggggtgtattccgcaaacactatagagttgggccttgaaatggacatcatgttcttcaaagtcctcggtaccgtatgtccatcctgtttttttttcgttttccgctcttcaaataaatgataggtactaacttattatttgaagatcctcagtggcgcagtgttgctattatgggtgttggttgcatcgcgaactgtacacggagcatggcgcggaaccctattttatgctccatgcctacaaaacctggcaataaaggaagagggggctgagcgagatgaagatcggcatcgggcgtaagacgaaaacattggtgaagtctctcattaccaagcctccaaacactccaccaatagaacaatgcgtatgcccaggtctgatccccagatgtaatgtatcgcgccggagaaccccgctgacggggtcttctgtacctgctgtcgtggccagtgaaggggaagcctagaagtactccgtatagcttaggcaatttttgccgaactcgatatctcgattcattggtcggacctagggtgattaccttgattacccccaaatgtttacggggtacgatgtattcatccatgccaagcactacctatcaggcgagtagtcacatgttcagcccgtcagcttcgtgttgttcgctttttccactctcttcttggattatggtcttttgtgataccggaggccgttttcttgactctttgctattcaaataagtctttcacggtagcgcttgagtattgagaatggtaaggcttgggttctatctatacagatctatggccaagcacaactctaagtgaagtctaggatacgggggagtacgagtttcccttcttgcaggaggtcttctctcctcgtgaatcgcacaagatcgagtatgaatactagggccctatattttatacggaaattatttctaagacctgttctttagttttgtcttcgttcatggcctgaacccaagcggtcgcaatgaccatcctttccagacatggacgcatagcaatggcaagttttggccgagggacttcctggccgaggacataccctatgcgcgcgtcttcgtttacggatacaattcaagcatcacccatccacagaccatgtctacggctagcatcaaggaccatgcgaatacgctgttgaatttattggatatggaacgcggccctcagatggtaaatcgtgggacccaacaagcttcatttgaataatcaattaacgtatcacagggatctgttccaccgaaagtgatattcatcggacatagtttgggggggttagtgatcaaacaggtcagatatatatcccatgaccttttcctatggcatcttcctgacagtctatgaatcaacggtataggcactgctcaatgctaaagaagatccaaaatatacctctattcgttcggcaacttctggtctcgtcttcttcggtacacctcatcgtggagcgaaggctgtggaactagggaaaattgcagcccgggttgctcgctttgtctccaaaggccatgctagcaatgaccttctaaactgcctggaattcaattccctttttactcgacagatgaccgatcggttccgacatcaactggaagattatcgtgttgttagctttatcgaagggaaggaggtgcagatagggggagttggaccagcatctatcagccatgtaagcagattttccttcactaattatgtgttcccccggtccccgtatacttttgtcctggaagagtgactgatattgaaaagcttgtggttgatgaagagtctgcggttcttgggctgtctggtttacgcgaaacccaactcaagctcgacgcagatcactcgcagatgtgcaaggtgggctctcggggtccgatgtaccgtttgataaaaggcaatatcaaacaactggtcgatcaggcgcttctgtctgagcaaggctttattccaccatcgataccttcaagtaccgcgtcatccccaccgccagtcccaccacgccttcattcaaatagtagcacgccataccatgggcagagtcgcccatctccatcgacacaaagggtgacaggaatgattttcaacgctctggataatgacccacggtctgttcgctccgcagaactcaaaaatcgggctcgatgggacgaagcccgaaccgtcgaatatgggattttccaggagcatttgcgcagccttggtccggatcatttcagtacactatcagtggcatacaatttagctgaggtggaaatggagtctagctacttagataaagcaaatgaatggtgccattgggtgtccggaaatgcccaacgcgtctttgggacaaaacatcccctggcaatgaagacggaaagtttgactgcagaggtcttgtgtcaacaaggcaagtaccaagaggccgagtcggtctgcgccaacgtgttagcccgtcagcaaatgactatcggcgaagatcacctagacacctgacactcggcgccgattgggaatgacctacaatggactaggtcgccgggaaaatgccgttatgactgcggagaagctgacagacaccctaaagcgtcttcttggagaaacccacattcgtgtatttgtcattgcgttggatgctttggaatacatcgtgagcaaccattctgggaacgaaaatgccctaattgtgatgcgttttcaacccgatgtacaacaagcagtggggatatcgttacaggtctaccaagagcttcgtaatgccttgggtcatggacacccggctaccattcgcgctctctgtctccacggccgagcacaaaactttatgcagcagagtatagaggcctcagagacactgcgccgggctttggccagtgccgaagaaacgttaggacccgatcatccgctgacattagaaatcgtgggcaacattggcattatgtacgctgcgcaaaatagctatgctcaaggtttactcagcaacagtcccgctgcggaagccttcccctggctgatacgatatttgaactgggttgaacagcgcaaaggcaaaaacaaccccgaagcgcaagccactttggagcttctggccagtctacatttcaacgctagagagtacgaacccgcccagaattactatgagcgcctcgtggcgaatattcgcggggccgactcagcaatgaccgagcgcgtcaacactcggcttcaactgtgccgggcgaacaccatgtacacccgtcggggcctaggatcgggactaggagggtttttgtccagcttgcagcgatactgacgtggttttatgattattatacctggatatacaacttcgctttatgaattcaatgggatctttgtcattattcagtcgtattcagtgtgatacatctaagtatgctcatgatccgtgaagggacatcatttgccttttgaattttatacacgatgagtggatcagccgatcatcataaggcgtttaatgtgtcaacttgttggggatgctctttctgtatatgtaatcaatactgattccctccattatgatccgcatggaaatcatacctagccttatccaactgctcatggccggcattgctgagcttcttcgcagggtcaaacttgtcagcaccgatcttcttctccgtggtgtgaatacctattcttgttaacttgaagtcttaaggcgcgagaatagacatcgaagctcacccttatcaatgtattcttggcccttattgcctccgagcttgttagcgataccagagactttgtccattgtgaaagagtgatgattgtggtagaaaaattgtaacgggttactgtaaaagagtaaaaagcaactctagataatgaacgaccctttatagggatctatagagtcaattactatgtactacgcatttcgtattatgcttaactctgtctatgataatgattcgctttggcatagaacgctatcgtcattgccgcactcttaaatgtgaatttgcccccgcaggtctcagtatctagtcatctttattggcataccgcttccagataggctcagatctgaggtcatattgatgatctcgatcttgccatggtagatctagtccgttgtctaacggcgatattgcatatcgtgacgtcagcgagcaactatcagattatcaggcattagttgacaccctcattatgaggcattaaggcatacaggcaccaatagctatataccgaggagcccttgctttcacggcgcttctccgatctctcagttatacaaccggctatcaatattcttgttcaaccttgtgcggtattctttttacacccttcttgtatatttgttacaacgataagctcacacaaaaatgtcgcatagatggctctgcaatctatcaaccagactaacaacaatttcatcaaaagcatcatggagatattgaatattcggctgtgggcaacactcggtgcgagctaccccgaacctaattgcttccccgcgtttgatcaaagtcaaaacaaacccccatactatacagcagccaatgagacaacccaaacgtcagatgtcaggcaatttttccaagtgctattgacagagctccacttgatatgtctatttaatttcttaccccggaggttcttggtcaaaccctcggagatgtgccgatgcgccgaattagccaagtaggatgcgcgtgatccgatttctttataacctatggcctcctctaagaccccgggaggggagcgtttctcgtgttaaatatatacccggtcttacaagaaacaaagaaatgggaaatccagcagaggaatgggagaaacccgatagcaagggccttgccttcgaacaaaatgctctttaccatgcttatgcttctaaaagcccagaatggcatcgagatatgaccaagcgtctacttcacaaggttgactggcaccttttacccttccttattctcatgtatttgttaaactttctggacagaaagtaggtgaccctgtttacagcagctatacatgatcacgaatcctaatagcttcttttagcaatttatcacaggctcgcctaggtacacttgaagaagacctcgacatggaaggcaccgattacaatctcgccacaagtatcttattcatcggctatctactgatgcaactaccatccaatctactcctaacccgtgttcggccttcgctgtttctgggtattgcaatggctatctggtatgacatatttcaatgagaccgacaagcgttagaatgcttaatttatttcacaggggtgtgatatccgcttgccaggcagccgttcagtcatttcccggactcattgcgacgcggttcttcctcggatttgtcgaggcgccttttttcccaggtgctgtcatgttaatgtgagttactataaataaaaaagaagtgtgtctgaggaggttctgacatttactttgtataggtcgagctggtatacacgacaggaggtaattcaatacgccctgtaaaatgacgaagcataaaatctaacttactcgcttagttgagtcatcgtattgcatggttctatgctggcagctcgttagccaatgctttcggtggtcttatcggggcaggtgtgctaggtaatcttgatggcgcgcatggcatcgccggatggagatggctattcatcatcgagggatgtatcacagtgggaatatccctgctcgcggcgtgagtcttttctgtgcttgatacgtacattattatgtctccagactgactctcagtagtatctttcttccaaattatccagcttcgactccctggttagacgaacaaaaacaagcatatgcgcagtggcgcctaatgcatgatgcaggagaagctgacgaggtcagctcaactagtatcaaagatgccctaggtctggtatttgcggacaagcgtatttaccttttcatcttgcttcagcatgtctcgctcctgtcgcaaaacttccaatacttcttcccgactattgtgcagaccctcggatatgggaaagtcgaaacccttctgatcaccgcgcctgtatggattgctacgttctttgtctcgctgctggtgacatggtcatctggtaaaaccaacgatcgcagcctacatatcatctgcttgatgatggtcagcatggtaggaggtgtgattgccactgctaccactaaccttggcgccaaattcttcgccatgttcctgtaagtcctatggttccgttatttttcgcatgtctaacagtaatcaggatgcccatgggagctgtgtctgcatatcaaatcatcatcgcctgggttgccaattccttcccccggccgctggttaaacgctctgcggcaatcgctattgcaaatatgattggaaataccgcttctatctatggtagttacatgtggccatcatcttcgggacctcgatacattccaggaggaagcgcgaccgctgcgatagcactctttgtggcgttggtcgctctagtcattcgcctggtgcatattcgcatgaacaaaaggctggatgagactgagtcatcacgagatattatttcgtccaatacaaacgatctagaaacccgggctgttgggttccggtatattctatgatcccgtatttggggtttgttcttacacactctaaaaagacatggaagacatataatggattggcaatttcaactataaagcacacataagtatataaaagtagatatagggctccttttaacgtccgaagagcggggttggcatccttcgattagaaccgtccacattcgccatcacagtccaatcaaaagagaccttggattgtttcctcttcgttttccactccgaaatcactacacttcatcttcaacttcctcttctcatttcaaaatggtatgatctatatcccaccgtgtgatcctttgaattaggctgattttgcaagtcgggttcatcatctttcacttcaatccctattctggatttctctcaagcgctatccccatctaaacccgccttcctagcaagccttcgcgacgccctagtgaatgttggctttttctatcttcgaaatgctccgatttcggaccaaacccaagatcggtttatagaaaaggccctaggtctttttgaactaccactagagaaaaagcttgaaatcgaaatggtcaatagtccgcactttttgggctactcaaggcttggtgcagaaattacggctttgaaacctgattatcgtgaacaattcgatgtaagcttgggctgtattgtttcttcggatatctatgaacacttttgtcagttcgcaaccgaactccctgcacctggtccagacgagcctttatacaggaatgtcgttggtcctaaccaggtaagatcttatatttggtctttgtgtccgtcaatgctcataaagaattctgccagtggccggatgaaacggcaatccccggatttcgggaatctctcgacacatatctgtctgaagtgagcaacctagcggagttgttcccaggattgattgcagaggccttagaccttccatcaactgcattcgatcaggtctttgatactccccagcaacacaaactgaagttgatcaaataccctcccccacctgcaactagcaatgaggattccggatttcaaggtgttggtcctcacaaagattccggattcctcacattccttttgcagggtacacctcaccatggcctcgaggtccaaaataaggctgggacatggatccccgcgccgccactcccgggaacgttggttattaacattggccgctccctggaggcgctgactgggggtatctgcacggcaacgactcatcgggtaagcttacggcaggagaacttccaagacaatgggagtaatctagggtctaggttttccttcccggttttccagggagtgagtctcgatctttctgccgagaagatctctttggatattccagctcatatccgtgccttggtggaaaatgacaaggtcaaatcagatgcagaggcaacttttaacgaaatattccgtgggtgcattggcgagggaaccttcattgctcgggtgaccagtcaccaagatgttgggcagcgatggtatccggaagtcttgatgaaagcattgaagggtcagaaggatttccttagctgattgctgatataatatctatgatatgtctcgagatgattgcatttgcatatgcctacctaggtgactctacgtagtgtttttcctctgccgggtggggctttcctatcttggctagctacagtgacacagcaaaagtcttagcaccccaaattctgccggtcaaatacccaccaattaaaaatgaggcagaacgagcggtatcacaaaatcagaaggcggtctattcaattaagaaggcggtagcagaaggggtgttcagacttttgctgcgtcactgtacctcaagtatagtaattgatggttggagtcgttgacgacagatcaaggcaattattctggctttcatcaccacgcagattctcgctatcaaaaacattcctgtttctcacagcatactgttcaactgtagctttcactaaaactcatgcagaatcacatttcataattatcgtcgttgacgctcaccaccgaggcaggtaccttcccctaagattttgtcgtgagctgtgccctttccttgcccacttcattcttccaactccctcgttcaaagcccgcaaatcacttgttgcccacagccatgacatccctgtttactgatgtcgccgaaagtgctattgggctccgcagaatgtcccaaagcggcgcggttgtccctgctcgtccttccctgctgcagggtctccccgctggatacgctgtgcgggttttttcccaactcgagcgactccaagccgacgcggggaggatcctacagttgctccaagaaaataaagatggaaaccagtggctcgttgtcctcggtctgtcgacatcaacaatccgaaaattggacgacgaccacagtagtctgggaggcgtggaataccgcttccagtgggaaggatctacaggcgtcatcaaggtggtcccatctcatacccacgacatgaccacagatcaggtcaccaggtccatcgacgacagactttctgcaatgagaatccgttccactaataggaagtgggctgcaacttccacctacaaacccacccccaccaaaggcaagcagggcgatcaagcttttattccaccatctcggtgcccttccccccagcgacccgcgggctggcccacctttgttatcgagactggtgtgtccgagtccctccctcgactccgggaagacgcgaagtggtggctcgccgcttcgagtggggatgtgcggatcgtactcgttatcagtatcaagaggaccagcgtctactttgaaaaatggcaattggctccatcgaatgctccgcgccctctcacccgggcctacatcgataccctacgccttcaaggcccccacataccccctctcttccagcagccagcaacgatccagcaagcatactctgcacacgaagttgaggtaacccccactgggattgaggggactcctatgattctcccgtttgctgcgttgtatgaccgagaccccggacgtggggaagttgatgttgtcctcgatcctcaagactttcgggacatcaccagtatcctattttaacacctgttagttttgctacatggttggttaactgtttacctcgtctccaccttgctgtgatgacaaatttgtaccacacaggtgcgttcccaacatgctaggcccatatcattatccacactacagggcctagtatcaatcttccttctccaatatcgccttccagttgtcacgctccgagccgagcttaatcagctgggacccttctttagctagttaactaactatggtatcaccatgaaccttttcagagatcacctgatctggcttacttgctcaatttactcgcttactgtgtgcattgtttacattagatagattgtttgctgaattgctaagcaagatatttgaagtttgcactgtttgcaaagggatagctatatcaaatatttggttagtgtacagctaactaaactccaacaagggttgcgagtcggcaaacgcgcgcgaccatgacctgatgcttttcacttcaagctcaatacaaccaacactaaagcgagccgggaaatactgtaaagaatggttcttcattgctagggatgaaacttcaggcactgtacggtgatttaacgttgagtcaatcatagcggagatggttagaacaaaatacatggccctttcattgccgattgaatatctcccatgcaccacaaagcctcaattttagacgaacgtgaaaattcgacagccagccaaccaaaaatatcgctccatagtaatggatagttattctgtggcggagcgattgtttctgtctgacatttgcggcatcgattgctgtctgatattcaaggccgctatgaactgtcggtgttccgtattgtgtaatgtatgggtctaatcaatggtattcgactctctgtattgcactattctggcaatttatactaccatgattacataaggaatattacagcattggtaggattaataaatcttccgatataccggcgtatctacgccgagatgaacgcgcggcggctggataacttcttcgtgatagattagacctcgccacggcccacgtagcccatgcgcgggcaggtcaatggttcagcccgcccgtaagccgcccatcaaccgcccatcagcgcacaatgttcccaaataggatgtatgaatcgctcattctcgatatcacagctcccatataaccatggcggtctgagttggtcaaaacttgagagaagatgtattgaaatgacgggttataacgctagagccctaccacacggtgacttgtcatgtggttttttgttaacacctcagcttagctttcagatccgcgggcgaagagtccagaagaatctcgcgtaaggcgcccgcgtttcattgcgtttttcggggattcttcttctgaactaagctgttcagggggggtctgagctcgacgacgctttcgcgtacctggtgacaatggctcatcgacgccttggtctagtagctgtttctcatgttctgcttcggcagacgaaagaaagtcacagagctccctcgatgagatatggatatcttgatcgagattggggtatttctgtgagatgctcttaggggcaaagtccctgagtgaaagctggagcgctggttgtttagaatcatcgactggaagtccagactccgttcgaaaaggctgcaaatcgtcggttagtgctaaaatttcttgggactgcggctgaaaaggaacgtaccatcatatcgatcacagcctttgcttcgagttccttcaccccatccacggttattttgtgcggtcgccaaatggatatagtcgcctttttagaccctctatattcaatattgagggcaatcacagcgttcacgctcgtattagtgtcgaggatgtaatcatctgctaagtccgcagcagctcgaactttttgtgaatagcacacttctatgataacaccgggatatttggcatattcgtgtataaatgatgcatctgggcatcgttcggaataagtctgctctgtatcatttatatcattcggcagccggattctggatgtcgataaatgtttggtctttctcgcaaaatcaccgaaggcttcatcactcttttgcaactctgtcaatcgattcaaaattttagagactacctcggcacaaaacaaatcatgtagaggactcggcattcggatagtaagacgggaccgtctggggtcgtaatcgagcctataatacaactcaacaaacatgccttcaatgcgcctgaagatggacagtacttaccgtattttgtcttctacgtaacctcgaagagattcgtcaccatccagtacacgtaaaacctccgtatattggtccggagtgagccggtgttgccaccaagattgtggccgtcgacctttacggtggagtttgaaatagttcagcacgctttgtgcactagtcgacaacttcttctcttctgagggcgggggtgtagggggagtattcacaaaactcccagttggtgtggttttcttctccatgaggtctgattctgattcaggcgacatccttggggtacggtttgtttatgtcgcagagaaggggctaagcgccggatgagttgaggtgtcacgtgatgacgtggttgcagggatgtcgtgtacaacgtaaccgccttggagggcccctattaggtgtgtcccaccagtgcgatgaggtccacccaggcgtcgagcaggcctatcgagttggttctgggggagaagtgcaagtgtcaaggcgtaaacaacctcgtcagtgattttaggctcaatgttgagctgaatggtcagtgcggtggctggagcctgacactgttgttttcttttttctcgatctttctatcgacttcgacgtgccacgacactcattaattagcttcaaatgatgtttctcaattcccaaatggccagttcatatatcattgagccctcatgtttggatgctctttcgaaccccaaataatgatgttaagcaaaaaggcgacccatcgaggttacataatggtcaggtgatgctcagtgaagtggacgtgtttgatgattatgtaatgcccaggggcgtgctcagttctactcagtgagcaaaaagcggcaaggactgagcactaaaacggaaagggaaagccaagaagtggtagaggaaatctactactccgtacataggctgggattagatgacctccggagattggtgagaggaatggggatcgggatattgagcaagagtgagactctcagtggctgtaaatttaagaccttgagagaatatatattctgtcacaaatgagggaaatgtaaggagaaccttggaagttcattcaagatcgtgatcaaaggggccaatgcccaaatgtcttggcggatctccaattcccatttctctccacatctctcttcttctctccacacctcctcttatccaagatgccacgcgccgtccgaggtcagctccttttgttttctgcttttaagatctcttgctaacattttgtgtccttggtaggtctgctgatcgaatgcgatccctcgatcaagtcaatgatcctgaagtacgacgaagagcgacatgactacatagtggaggatttggatgacgagaaccacctggtcatcaaagagagccagttgcagaacctcaaggttcgcctagatcaggtacctactgcaccctagctattgccgggctatccgaggactgttactcatagactcgccaggaccttgacgaaaagatcatgcagctggatgaatccggatccgaataaggctgtaaccaggtatttctcaatgaagacgaggcctacacacgcgacgcagaggcaaccggtcaccatatccaagtccataacgcacccgccaaacaccatctcccaccgcttgttacgaaagatcgcatcatgacttcacccgtttacaatggttgaatgcagtccgaccgcccctctcaatcacccgccctttctccgaccgataaggcttggccactgtcaatgatagtgtgggggctgttttcaggcagcgcaagagaggtcggagattgtgcaactcatcgaggcttgtcatacttcacggtgctgtacatcccagctccgggccgtgctggctagtaatactcttgcaatgaatggaggcgtgtggcgtgatcgaatgttagcgaagcacatcatccaaaccatcggagaaacccttactccgacaggcataaccatggaccccgtatatagtgtagatgtcactatctagtgccacattctgctacacactcattggcacattggcacatacactgtaatcagtcaattacgtcttattgcataagacaacagtcgcgaccgtcgactgatgtcaacaccggttacacggcaatgctagagacagcgtctttgtgttccttttctgtgtaagggcacctggtttcgagtgcatcatggctatataagtcccttatgaacgcccgggacatccagcttccctctcatgagacataacccgcaaatatcagcttcaatataaaatcacgtctttcaagtcacccaacttccaactcacaacatgtctgttctccgtaccaacttccccggctctggcgacttcgcccccctcttccgtcttctggacgactacgatgaccaccgctctgcccgcaaccaggctgcagttcgctcgttctctcctcgcttcgacgtccgtgagagtgaaggggcatatcacttcgatggtgaactgcctggcatctctcaaaaggacatcgatattgagttctccgacccccagactctggttgtcaagggccgcactgaacgcgactacgaagacgtcgagccgccagaggaaaaggaaggctctaaggacgacgaaaccaagtccactcaccggttctgggctagcgagcgctcggtcggatcgttccagcgcgtcttcaccttcccgactcctgtcgaccagcacaatgtcaaggccagcctgaagaacggcattctttccatcaacgtgcccaagtccactgctgcttcttccaagaagatcaccattgagtgaacagtcacacccgtcacataaacgagccagaactatctttggcaatcgtattgcatgggaatcggacttaattggtctggggctattcaactcagaatgtattagtctatcttgattcaaattccatattgttctattttttttttggatattccttatgctccggggcctcggcacatgcaaatcctatgatacgcaaaatgcaatattaagataaaacagaattgaatcactttgatcacatcaactacttcaacaactacttcaactgcttcttcaaatacacgtttttgtctgatcaaaggtcgggttttctgactagatcaaagtagaagtagaattagaatcaagcctagcagaattaaattaatgccttatgttcaatggcaataaggtcttgactcgtgaagcagacgttactgtgacatcatcataacacttccattcaggaacagaataataataagactcaatgatcatactcctcaaagaccacagttttactaaaacagaaaatgtatgagtatcaaagcgagggtattgtgtcggaggaaggtgccaatccgttcctcgagcaccttccctttgatacgcccgtctacagttacgatcgacagtgcgctatagagagtctcttccctccatgttcaggttcagtcgaggatcgcttcgtcgttttgaaaaatttccctccagacgcattctcccagcacgaagaattaccgcggctttgcgattattcgccattatttcggatccttatcatcaaaatgccgggtggaccacatgaagacgcggccctccaatttaactacttgattatgacactcgccgagaatatgagcgtccgcagactggtcaggccgtggggatccaccagagtcgataccccggaccggcgaaaacaggcagacagcggatgggggccaagagggccaccgagacaattcccaaccgtagccctcgaagttggcttcaccgagaccacagcaaaattagagaacgatatcgcctggtggatcaacgggtcagatggtgatgtgacaatgggaatcactgtcgatatcaaaggttcgggctctattgaaatcaaaacctggaccccaggttctgagccgccatcccacccgaactacaccacagcaagcggtcgccatgtggtcgaccaaggtacttatgatccgcctccacctcgagtcgccgagagggtcctccttaagagggggcgtaatggcgctccttctacaacggaagggaacggtataaccataccattccgtgatttgctgttgtccgaaccaggacaaggcgagagcgatttcgtcctgacctcccaaatgttacttgaagaggtgggagaacccgtttgggatacaatggaccaggtcgagcggaccaaggcctcgaagagaagttaggatggttgtcacgttttgccgaggtcccccgctgtgtaatcacagccctttgatactccgtggctctctttctctccctcaaaccaaactccaaaaaaacattcatcgttctccctcgaaacatggctgaaaactactctttcaaatatttcaccgttaaatttcccaccgaccatcaatatgtggcccacgtggaaatcaaccgtccggaaaggttgaacgccttcatcgaagtgtaagcgctagttcccccagacttactgtacatatctttaacaaatcaaaatcagtatgtgggaaaacatggccaagatcttcaataaactttcctcagaccctcacgtgcgcgcagtcgttctcagcggcgctggagcgaaggcattcaccacagggctggacgtcaaagcagcctcggagggtctcctatcatcagacgacaccaagaccgacccagcccgaaaggcagtcgcgttccgtcgccacatcagcgccttccaggactgcatcacggcagtagagcgctgtgaaaagcccgtcgtggttgctctccacgggttctcattgggactcggtattgacctatccacggcgactgacgtgcgtctctgcgcccaggatacccggttcggcgtcaaagaagtcgatatcgggctcgcggcagacatcggtacgctcagccgtctgcccaaggtggtcgggaattacggatgggtcaaggaggtggcgctgacggcgcgcgagttcggcgctgaggaggcgctccgtgtgggcttcgttaatgcggtgtatgatacccgtgaagctactatcgtggctgcgttgaagctcgcatccctcattgctagcaagagccctgtcgctgtgcaaggtactaaggagatcttgaactattcgcgcgaccactctgtgcaggatggactgcgctacacgagtgtgtggaatagcgctgctttgcagacgcaggatgtctcggcggctttgctgtctgggttgcaaaagcgtactccgacattcgagaagttgtagtgacaaattcacccatgcccactgtatataaggtcaaaacatctagtctgctaatattgaatgtcatcattttttacagaaactcaaaacccccgtgcgtttgccaaggaatgccaatatcatcacatttgacgtgacacatacggagttatcccgtacacatgaaactgtttcagggtaaatttccggcattttatccaaaagccttgttatttcaagtccgtgtctgagtttccatgaatcagaagcatcgatcaactggtcgatcaacgggtctccgcattccagccctccccttttctccgaagtaaaactcgagagcccactgaggatgtcactttttccacgtatccaagccattgctgaacatggcaaaatgtataatttcgaagaaactgccaattctatagagaaaattcagtctgactttccttttcactaaaaaattcgccctattcctctcgccatgaaatctgctattcttctctccgcgttcatccctagtgcgctgggtgcgaccatctacctcgctggtgactcaactatggcaaagggtgggactggatctggcacagcgggtacgtgttttccttgaagcttccggatagcatcatgctaatactcccaggttggggtgaatacgttacgccctatacctcactcaccgtgtccaatcaagctgtcgccggccgcagcgcacggtcatacacgcgtgaaggtcggttcgatgcaattgcagcagtggttcaatcaggagattgggtgatcatcgagttcggccacaacgacggtggctctttgactcccaccgacaacgggcgcaccgattgttccggcacaggaagcgagacttgtagcacaacctacgacggggtcgccgagacagtgttgacgttcccggcatatgtcgagaatgccaccaaggtgttcaaggccaagggcgcgaatgtgatcatctcgagccaaacacccaacaacccctgggaaactggaaccttcacttatgccccctcgcggtttgtgggctatgcgcaggtggcagctgcagccgccggagtgccctatgttgaccacggggcctatgtggccgaccagttccagacgctgggcctgactgctgtcgatgcgtacttccccttggaccacacgcacaccagtcctaccggtgcatcggtagtggcccaggcctttttcaaggctgtggtttgtggtgatgttgcgctgaagagttccctgagcaccacctctttccctggttcgtgtctctaaacgaacagcagagtagcaagtacggacccgtgcaatctgagcttattttgtgactatgattgcgctgcctgtagagagagataacagaagattgcgtggcttcggctggacaactatatccaagagaaattgtagattgggttccagcccaatctggctcatgagcaggtaaatccgtaaggtttcgcaacaaggcaggaacactgagatgtaaagctctcgttgggaatcccagtaggttcaatttcattcctccagaatagaccgaacgatgccccggttttcgactcggtgataatattgattcacgttcacgaaacgagcatcaagggcaccctgggtctgtacaatatcgcgcagaactggccatagagagcaatcgtcgatggtaaacacggagcctcctaggtaatgttttccctgcagagtacactcccaatcctcaatcccgtattcaaacccactggctggattggtggcacagtgccgacgccagcgtgccagaaactggtcgatctttggcaataaactgcccccgcgtaacgaatccacgcctggccgtaaggtctcagtggatcggttagccatgtgcgctaggataacggagtcgcccgcgattatttctccatcacccgtttcatatattggcagtgtcgttggatcactatctctagctcccagttgctcatggttggtgatcaattgataccggacgccgttttcccccagacagagacgaacacgcaaattggccacgagatcacagccaagtaataattgacctgttgctgtagtcacaaagttgaccacgtcaaagccttcaccgtagacggcatcccaatcgaattcggtggcacgattttcctggccaaaagcaccaatgagacgtgcagttgcagcaggatccccatggaccacagcgcgggtgtgatccaatttcttactaacagccccttgtccccagattgtgttggccacagggtcgatgaaagtgccaatatgacggaaagtaagggaaatgcgctggccgccgtaggcttgctcctcggcagatttagttggattgggccgtttgtcggcccggattccatgaagccatcgcatgtttgtctttgggccaagaacgaaaagtgacccgtgaggaagaggcacgcgctgcgttgtccgacatggttcattttctccatcaggctcagatgccgaggtcttggtacggagaaccatcacgcgctcggcgcctagactgacgttgcagatgaaagaccctcgcacaatatccagcgtcttatctgagtgctctgatatacgatcctgtccatcacggtaaagctgaataagcacatgattcaaggggtggcctagtattcgctcgacagctatgcggacttcatcaaccgcggaggtaaatggcttgaagggtggagactcgtctgccggatgacggtatatgggtatggctccatcgggtcgaggttgaccttggactgcgaccaatcggggaacctgacccgacagatggtacatcttctgccaatctacctcggcatgtatacgctcaaaggagtctgcggccaagttgagattgttcacgaggcgcgagtcgccctccccgacgttattttgggatgtggttggtatctccgcgcattttgaaggtgttatcgtcccatcggggtcagcccgaggtctggctgaaggttcttttggaccttcccggcgcttcggacgacgggcacgcacgcggaccttcttttgatcttctactggaccccgcgcctgcgcagcagtagcgcgctgtgcgcgagaagaacgagcaggttcggggccatctgtgggagaggtgtccgcagtattccagaattccagaccatccatgacgctctcgagaccagcagtagcggctgacctcttagactgcggtgcgccttggcgggcaattgtctcagtctcatcccaatctagctcctgaatgagctcccgagcggtgataccagtcgctcccaagatatctgccatacgtcgcattgcttcttgatgccgctgaaaatcgcggaaacccaagcaatcctccacaagagttactgaaaacccgttgcggacagcatccaaagcggtcgcaaacacagagacattggacaacgagccacaaagatacaactcggtcacaaagtgtgtcctgaaggatagcacaaggccgggggactccagggcggagtaacctgttttgtcgactacaatgtcatgctgggcgttgatagcggccagaatcggtgcggggaactgatatcccggggtatgcggatcacagcatagcgaagagtcggcggagagaaaagcttcctggtcaacgggttctggagaatcatggtccgacgcaacttcaattatatccgaggtgggcatctcctttctgcggggtggctctctgtctagcacaatgcgatcaccaaagttccagtcgacgatagtctgaggggattcatatcgtgagcgcacccaaactacatcgccgactcgacggaatgcagatgccagctgtggaagggtctcgaggatatctggtgtattgaagacatgtaaagccccggacggacggacaaagtcattttgaaagtcaagtagtaacaaggcctttcgggtctggatggtgggcagatccccgaatgagaagacactcatcgtatagacatggtacgcccaggactaattggacagaccaaacaataccagtggatatgaggatatgcagagagaggggaggggcggagagcctggaggcctgaggcagaaatggtactttggaaggaacgatcgtcgaaaaagtcgaggcaggtacgaatcacgtgtacgaatataaaaaacatagaaagtctggaccctcacggcctcacgttgatattctgctatttccggagatcacgcctactccgggggagatatcggccagcccatgagacgaaccgtaaaacaatctaagacaatgagcctatctacggagtaccgagtatgcgctggtcgcactgggaaacgcaattcatgacataataaattcctatcctccaatcaggacacccgccggtgtcggtgtggatctccggggagcaaggtctgctctccggtaattttctacggtgactcgaatcgcccagcatatttgcccattatttaaattcccaagcttccccatccaacttcttcttttccacactctcctctcctccatatcttcacaatggcttctcgtggtcttccccgtgccctccgcctcgcccgcgtggccgctcctcgctcggtcattaccgcagcccttcctcgccctgtcatcgctgccgctgccgctatcccccgtgtctcctcggccgtcacctccgtccgtggtatcaagaccattgacttcgccggtgtcaaggaggacgtctacgagcgtgccgattggccccaggagaagctccaggagtacttcaagaacgacacccttgccctcatcggttacggctcccagggtcacggccaaggtctgaacctccgtgaccagggtctcaacgttatcgtcggtgtccgcaaggatggtgcctcatggaaggaggccatccaggacggctgggtccccggcaagaacctgttcgatgtgaccaccgccattgagaagggtaccattatcatgaacctgctctccgatgccgcccagtccgagacctggcccactatcaagcccctcctcaccaagggcaagactctctacttctcccacggtttctcccccgtcttcaaggacctcaccaaggtcgaggtgcccaaggacatcgatgtcatcctcgttgcccccaagggttccggccgtaccgttcgcactctcttccgtgagggccgcggtatcaactcctccatcgccgtcttccaggacgtcaccggccacgccaaggagcgcgccatcgccatgggtgttgccgtcggttccggctacctctatgagaccacctttgaaaaggaggtctactctgacctctacggagagcgtggctgccttatgggcggtatccacggtatgttcctcgcccagtacgaggttctccgtgagcgtggccacagcccctccgaggccttcaacgagaccgttgaggaagccacccagtccctgtaccccctcatcggtggtaacggtatggactggatgtacgctgcctgctccaccaccgcccgtcgcggtgccattgactggtccagccgcttcaaggacaccctgaagcccgtcttcaacgacctctacgacagcgtccacaacggcactgagacccagcgctcgctcgactacaactcgcagcccgactaccgcgagaagtacgagaaggagatgcaggagatccgcgatctcgagatctggcgcgccggcaaggccgtccgctctctccgccccgagaaccagaaataaataataccttgatacccgtgggggtgcaaaaaatgatgatgtactatgaactgtgttttttgggtttcaggtcgaaaatattattttgaggctttaccggccattccccagttactttcttttccattccgtagcttctagattgtttctggcggctcacacctgcagctgtagatcaatagacgccgaagcccggagaagaatccggggtaagataagagtcattctacgtctcgtctgtttctcctcctaaacctcttcttcagcctcttctccagcccacaatgacacctgatgttgcagttcaatcgcttactccggccgcagttgaagcggcgtatagcctcatccagccttacgtgcaccggacgccactgctgacatgcaaaacactcgacacaatcgcctcaacaccgcaatcccccgaagccttggtcggaacgccatttgaaggccaaactcccgctcacccacaaattcgattctttttcaagtgcgagaaccttcagcgaattggtgccttcaaagcacgtggtgcattccacgcattgctgcgactattggaggagcgcggggaggaagtcaaacggcgcggggtggttacacatagctctggtattttccgatcttctaccacacaaatcagaattatacatgctgaatcttctgtctttcagggaaccatgcacaagccctcgcccttgctgcctcgactctgggtattcccgcctatattgtgatgccccgcatcagcacgccatcgaagattgcgggtacgcagtcccacggcgcggaggtaatcttcagcggctcgacaagtgtagaacgggaagctgtggtgggagagatacaggcgaagacaaacgccattcttgtgccaccgtacgatgacttcaatgtcatttgtgggcagggtacaacggctttggagctggaggcacagcatgccgaacaagctgggtcccgacccctagatgccgttatcactcctattggtggaggtggactcaactccggcgtggcgacgtggttctcgaataagaagacacgcgtgttcggcgcagagcccagctttgaaggcgcagatgattgtcggcgcggactgcaggttggactgcgtgtggaagccgttcgcaccctcactatcgcagatgggctgcgcactccagtgggattactcaattgggaggtcatctctaatccgaagaaggtggaaggggtgttcgctgtcactgaagagcagatcaagtcggccatgcggttggttatagagcgcatgaagcttgttgttgagccgagtgcagtggttggattggccgtgtgtctgtttgatgagaacttcaggcgacgagtcgagcaagagggtggaaaggagggatgggatattggcattgtattcagcggcggcaacacaaccgtcgaggcaattgccaagctgtttacatgaatctacgaaatttgagcctacgaaattgaatataaagcattggcagagatgaatatacaccgtgaatagaaccgttcaatcaatgatgaggatcagtcatctcaaccccagagtcacgaatgtaaaatgaaaagctcccaccattgttcgcctctattgcttccacgatgcgacgaggccattcattgtgtccccacgtattaacccatgccgatatcttcccttgctgaaccacgctctgccgtgaaggggcgtctttcacggctgcatgagcggccatgtcgggtggaaatggacgaacagaagaccggtggacaatcagacgcagtgttgcaaaagtgccccagggtgcagggagagcaggtctcagcggcggagtacgagcctggggctggtcgtagtaaccagcgccagaagctcgaccccctgataccgttgtagtatacacaactgcacactgaaactgactctgcaaacccttcagctcgctcaccagctcggtatagaggtcagacaaatagaaacttttcttttgctcgcgctcggcgtcaatctctgcctgaggacgcccgatttcttctgtccgagcgacctcgtcacgcagccggtcttgtttgatgaaggcggtggcactgtcgatggcgatcatttgcaagggacgtgatgcggaacgatgtcgtgagagatcgaaaaggtacgattctagcgtgcggattgtcgccaaaagagcagatgaagattgcgggcgaaatacatggacatgctgcagtgaagaaacgagcaatgattcaagatgatgatctggcattcctcctgattgagccccgagacctgactcagatgttccacgctgcttcagtacgatatctcgagccacagtccttagtctttcggcatcgaatcggtggtcggtatctataaacaccacggctgcctctttgccactgactgagatgtctccatatcttcgtggtaagatagcgagagccgtgagatagtacaatagctgcgacttccccgaagccgacaggctgcttgaaatctccaagacaggaacctgttgtttcttgctaccggttgggtcagagggcaacacattggcaagtggctcaatgtcttgcgcgccgtgtatttcatccggcctagaaccctgaccagccgggcattcactgtgcagcagcatttcctcatcttcaagaatctgctgttctataggctcacttgaaggttgaagctgtccatcgttcatagcacctgacataggaagtgctttcggcgcaaagacttcaagcaaagtgtccagaatgggcacgcccaatgaatgcgggtcatggcttgagtgactaggaaacacacgggccaatacagagagtatctagaactagtcaactcaatgcattcaacgaaataggcaagctgcaatacctcgtccaatccctcttcatgtacatcggctagcgatctctccccgagattggctgccatgggtaagcactggactgcgtcatggatcttgcatcacttgatcttgaccaaggcgtttaaagcgcagtgaatagatgcgaccacagtagtagaagtgtagaagtgaagtgtacaacatacgagtggtgatgcgtgcggaatcgaatagcgcggctgacggagcttcggaacttcccaacttccaaacttttcccttgacaacaccaaacctccataatctcactctagttggattatctcatattcataatcgcaaatcacaatggctcctctcgtccccgtattctccgccgaatccctccccgatcatgtcaataccgttcgccgcaacttcatagacaaacgccgcaaaggcgaaccagtcaacctcaaggagtgtccattacttgaaatgacacaattctcttgcaatccaccacaaaatggagtccccgaaccgggggttgtggtgtgtgagcctgtggtgcgattgttccgacggtgagtcttaagctccgcgttcaagtcaaatggcaagctgatcttgtagctgtgctggtgggttaatggttgaaacaacatcatgggagccaattaggattgcagaggaagcaaagcaagcagcaagtacaaaacaatgagacggactactttgcattacgaatgcgcattgggcggagttggctatatgggattacgactatttgcaagtttcaagaataaaagttgcattcgaataatgcttgtgactgccatggggtatctcctcaggtcatgctcctgaataaaacacaagcgccagcccataatcgggggagaaaagaaaagaaaagaacgccggtaagccttatgcctttgtaatttacaggtcaatcatgagatccgccggctcgacacttgctagaggctttggagtcttatcctctcttcgccgtgcattcgagctcgtctggcgccagagatctcgctcacagttgacaatggggcccagctccgagatgttgagtcggggcttggtgtcggcattcgccgggtgtcccgagtcaatatccatagctgagttggtgattgtgctgtgggagtccttgctgtgctttttggatagtcccttgattgtcttttcgaacatgctttccatgctgtccattctccgaccccagagtttcttatcgcggccagtcgaacccgtctggttgtcgcggaatgccgcgcccgctaatttgcgcaaagcttcctcgccatgccgtccatcctctgcagcgcgttccctaattttgcgcgggtcgttgtctcgtccgatgaaaactgcggtggcagagtaggtgtgtttgctagggaagctcgggaagtgtttggggatatagggacgacttgcgcggtcgtcttcactgcttagagacgtgaggaatgggagagatttggatatttcattctctggtgggggagatggtagtaatgtcggcttgggttggtcaaagggcgttttgagatgagggagaagatcatcgggattgaggcggagacgcttcagagcgtggtcgaaatcgtgcggaattggttgaatacgtcgcgcagatagcatggactgacggatgaatgtagagagtcggagcatatctggagatttcaggcgcaaaccgtcaattcaagctccaaaatgaatacgataccaggtcacgtacactcttcagtagcactgcagagacttgacagcgcagctggatcggctaactcaaaccccgaatccttcaaagtctggccgactgcccgattcattaattggtccagttgggtgtcatcttgcacgactggctcggacatggacgggagaatcacgggctcttgtaaacgatggtggtgatggtaatgacgctttatccgcttcgcatggttctgatcgaatgatgaagcaggtcgtttggtatgggcgcccgatgtcgccatggcgattgtgttggtctaattcaagaagtggtcgtccagactaggcaatgttatcgagttgggtcacggtcacgtgctaaggcggtaagtagatcgatgtcatagaccttcgggggaggaggaagcaatgtgaatgaatggcttagtttgggcttgagtagataaattgcttgggtaggacattcattatatgacggcaaataattcgaccaacaaggcttcgttcgtcctacatatcctccatctcgaaggcttcctcgtggtcttgcttttggtattgacataggtagtgctaaatggcaaaaagctattccattgatgcaagtgattcattatatataaatctacaagaaaatagatctttgatcgttatttcgcagccgcggaatggtaagggagtagtgaacatgccataaattgtagttggctctcatagttagaccgaccaatccggcggctcgcttagtccgctccgaagcttcaacttcacttcacaaatcagccttcttccctacccccctctcctctccccaccaacgtccgaggcaggatttaagctgtccacaacccatattgcttttgctcaagcatcgattgacgcaacttattcgtcgcaatgcccgccgccattccccccattaccggcgtacgtgccccttccgttgaaggccgggttaacccgctcgggttaccaggtcaattgaggtgttcggaatgatttactgacattctatgcctctcacagatgctccgccgtggtcttgtccttgacctgagcaccgctttcggtaagtcgtgattccggatcgagtggcatgattcaagccgacaagttgaacctcgcgatctcgcgggagcaaccacatgaaatacaaacaccatgaagacggctgggatgagatcaacaagtgaaatagttgctgactagggttatctcatccactaggcttcggtactaccttcggctacctctggtggtacggtaagtagatttatccccggctgcgccaccacgcgatcgataattcgaaatctgacatgtgtttgtcctacaggataccacctcccccgcgtgcgtgagcgtgatacctactacgctcgcctcgagattgagcgtgctgcccagcggggttaaatcgatcaaccctgatcacctctcgatcgtctccctcccgcccgttcggcgccagttcttttctttgtcaaagcgttatctagaaatcgcccagtggtgggggcatatgcctccacgtcaccatcgggtctggttggatcgacgggtgtgtacgagtgggtggttagatttgagattgattgtacatatacgcctgtggacaaccgaccgttttgatttttggacttgactcttgaaatagattaccgattggccatggccatcgcagaccattctacgtagtagcgcccgaacgcacagagcgatatacttgacccctacgcctgaccaaccaaaatgagcgaattggatctattgtgttcaaacgctaattacgccggatatatgtacgtggaaacaccagcgcacccttcgcgggattgccgaaccatgtctccgccatgtgtaaagccataaccatcatcccgtatctggtcatccccgtggggtatgggcgagtgtctcgtatggaaccgatggaaaaacggcaagtatgaagccctaacaggcgttcaccgtagcactcggtcaaatgatatgcctcggacggtcccgccggccatggaggtgcgcacgtttttcttgaagttctcacgagtggcgcgaagatcttccgcggcgtccttattgagagggtcggatgcgtttggctcaaggaaaaggaactgcagtagaatacgggttagctcaagtaacgaccggttaaaaggaagacatcaacggacctgcatgcccacaatgacagcattcaaattcaacacgggcttccagtcctctcgtagaatatttaagcagacgttgccctccaaatcgatattggggtggtagatcttctgcgtgcatttgaccttgggggggtcatgggggaagttctgattcacggcaaagctaaagttgaagacgccacccttatacatgccctcgtccggttcgatagtcaaggtgaagttaaggatgtcgtcagggttcgggaaagacattttcatcgtactgccgagggtgagttcttgaaggtctaaagaaaaacaagaggttagagatatataacaataagccattaatcaagcagcgagagtaataatgtccgctgcgggagagtcactcacctcgttgcacgcgtaattgcgccgcggtgaccttcttcttcttcttgcctccagcaccctcggcattttcagcctcctgctgcttttgcttctgtacagacggttaggaatagtttgattttatagaagcgccaaataaagccctaccatcgaccagattttcaacattttggttgggagtgaccaccccacctggtggaacggacgggtttccgggagagcgaagtagaaagtttatggcgagataaccactctggggatgtcagagagtaaaggagagacagaagccagatgcagagctataaaaagcgagatcaacgggtgacaacggtgacaatgatgagagtaaaggatagccttgtgcttgcggggtctcagatcagcaatcgtcctttatcgcctctccgccttccattgacatattcgacctcgggaactccgtactatacacagtctatgggatatatatctctactaagtattgaaatctcgaggagaaaaaaattaattgaatatgaagtacataatcatagcgctccgaatgcgatcccggtgcatggctgatccgacaaaaaaagatcacagtaaccgtcaaggtaaaaccgcgcgaatacatactggctggcattgcaaaatgaaaagagaacagaattgggcatctttaggtagaatacagatcacggtatgggaaagaaaaaggagaacgaacaggaaatatgggtcaggggggtcatgaaaaaggggcattttttgctcgctggaattcaactaccggcgtgcaaagcagcatttgataccagtgcgacccaggaaccaacagcatccaatgaagcggaacaatgccacaatggcgttggaccacaagagggcctggaagaaacgggctgtacgggcggtggcggtattctatgatcatattagctggtggtctaataacaaggttaagagaaagggcgaaaactcactgtgaagccgaacttgtcgacggcctcgctggtgatgcagacggccatgagtgcattactgaagatccaaaaggtgacaagtcgggtacggaaactcttgtaggagtcctcgagggtcttttcgtcgttttccacgggggcaacgaatggggtgagcgcacgcttcacagttgcctcgaactgactgtcgatatccgcttggggcttgtcaatttcttctattaccgcttccttgctgccttcgtcctttgtggtcgtggctgacggcaatgcatcggccttgtcggaacccttcgtaccccaggagacatcgtgccaattgctgaaggcatagacgttcaagatgttgatataggacgactggacaaccatataggcagggaaggaggtgaacatgtgccatgggtcagcgtacatgaaggaggcaacgaagtaaagaccgaatgtggcagccaaggcaatgataatgataccagcacccgtcgaaccgaagaaagagtcaaggaaggcttttacgcctttgtcggtaacaaagtccatgggcgcgccgccggtgaacgcacgaacgaccaggtagatcgaatcgaccacaatgtagacctgaatgagaccgaagaccacgaatgaagcgaggtaggagaacttggaacccttgggtctgttaccgagcgcgagaatgaactgcagcaataggaaagcgaggtatccgtacttgacaatggtgttgataatgggcgtggccgtcttgccgaaggggaaagcggtttgtccgttgctggcgctgggagtaccgacaaggtcaatgatgacagtggtggtcagccagtatgatgccagggagaaccaggtgaggatagtgttgaagatgttatacaacatctgaatgtggaggaagaacatgcgcacgatgttgtgaccactcttgtacatacgtccaaagtgcatcagcgagtaaataccggctgcaaaagaaccgttgagccaacggcgacgctgggagatgaactcggcagcaccttcgggcacatcagtttcacccttagaggctttgacgtaggacaagtgccacttagagcctgctttggcgaccaactcgaaacagagaattcgatcctcggccaagaacatgttcttcttgaaaatgttcataccctcaatacccttctttccgagctgcttagacagcgtgtgatcaccatggaaatattgttcgagagggcgacccatgattgcacggaatcgataggccgagaatgcaccgggcaagacactaacgtaaccaaacgaactctccagaggcttatccaagatgttactgatcttgtactcgaagttctgagcagccacgagagggttgatcaagtttttccatcccttacccagcatagcgtgaatttcaccacaagcgccgccgagatccttgtcgttatagaatgcttcccagaggtacaacaacgacttagggccaggcttcgtaccggcatccagaaggatacagatctcggggttcagaatgcggccgaaggcgttaaagagccaacgatgcgaattgatcttcttgctgttcttttgtttcaaacagaacatcatttgcactggtgggagtgtgctgggcccatcgtccgtaggccgaatgagctgctgacttggcgtgaccgaaagctgagtcgtatattcaaactggatattctgttagcgctatttcatttggagccatattccgtccacttacaatatgcgccaaagtctccttgccgtcaacgtcgcgcttcatgacaccatcctggtagataccgacagtcgcaagaacgtcaagagtatccttgtcgcaagggtcaataccatcaaagaccagcgccacaacaatcttctgccacgcgggtccacccttgttccagaactcggatttcttcaggttgacaatgtcgcgaatgttctgcatcacaccgtgcaaggtacgggccgttagattcttatcctcgttgtagtaggtaatcgcgatgagcagctccgtatgacggttgtacatcgcggggcgcagattgtaaccattgtggagagtgaattcgttaggatcacaagtggctgcggtgtctatgaagtgaaggctcattagtctttttctcttagagccatatgttcggtccacacgtacatcgcatgtgggtaaactcctcgcttccaccttccacgtcgttgcggtatttggcttggatggcattctggatggcactgggcacggggtagtcgacactcaggacggaaccctgcactagcttgaccttcctggtagcatatctgcgcaagccaccgccagcaccaccaccgacaccaccgcccccaggggcctgtcgctggcgccaagcctctgtggatgaggtttcgctgcgggcgtagggcgatgcaactcggccggggaccccaaaggctgccgcggtggtctcatcctggccggagtagacgttgccagtattatatgggtcgtggtacgaaggggcggtgtccgctgcgtaggtctccgtcaagctgtaccccgaagctgggcgctggggagaaacgccgcgcgagtgggggtcatcaaagggcgtcgcgaatggaccctgctgttgggacaataatccgcgggctgcatcctcatcctcgcgatactaaagaaaaaaaaaacaccgaggtcagctctagcaactagttcaccgcctctccacacacatacctgcgaagatggcacatcctgcagatgaacaccgtcatcgtagcccggggagtgcgagccagagccgtggtaggccatggtgtcgcaaaggttgaaaaatcagaaagggatgtgtttcaaagctgacaggagaggggtatctgttcaagcagggcgcatttatgaacaattatcgaagcaacggggctaggggaagggagaaagtgaaatctgtttttcccgagaatcttggaatattgcaaatgttttgaatcaagggtcaaagaaaagaaaggaagagaagggggggaaagggtaaaaaaaaagggagacagtcagactagaagggtcaaaaatagaccgtctctaaccccgtcctggtttagtttcccctttattttgggggtttttttcatttgactagtttattggaattatttgtatctttaaatatgtacggagtatttatttttgactattctatactagccatggatatccttgacttagtcgtaaatcgcatacatactccatgtccatccctggagaacaatagcccgatggccccccgaggccctatggaggaccctcactggttaggaggcgaaagctgagatgctcggaattctgacatttactctagtctccttttcgttctgattcgtggccttctattgattctatgatgctttgggtagggagcagccttggaactacatacatactccagatcttttatacgtggtactgagtggactagaacacccgaacctaataaacttgctccactggtgaaacacttggtgaatagacctctcatataagagttcagtttggttcacctaggtagatatagagaattcattccacattcttgagagaacaacaataccattagaaaaggcttgacacctagggcggtatgcccgactccactataggtgtttgaatgccagcacataaatgtgttcaaagccctcggctacagcgtcccgttttaattcctcaattgcaggctgagcttattctgtaattctttgtgtatggttattctatcattctaccaagtactctagcatgaagtatactctgaggtcacctgactctggtaattttagacctcactgtggaccctaagcatttagcgtatgtatattttgctgtgccaagtcgattagcctattatattccaaggctaacattaaccttgggctgagttgtgctgatgttcagcctcgtagtcagttcattccatatgcggtggctatgtcactgcgccccgaggtatacgatgattaccatgggttgaaaatttcgaatcttaatttcccttaatgtccctgatttcccttttttccccgtttccccaattccccaattcgccaagataataagatttcagtgaccccattcgtctggtccacggaaggcagttagagattaattgccgctaacccgattggggaaatacaccagaaacagcacccggacaacaagataagcagacaaaccaaacaaacacgccaaacaaaccacaaacaaaccaaatcagacaaacagccaacgaaaaactctatttctcgcaatcttggaaaatcgatgatccgagagtccagacccgcggaccacttgcaggcacagtaagatgcccacttatgttcctcgcatccatgtaaggtgaacatgggatgaaacaatctgatagcatatttaatattaaaggctgtagcatctcagatttcacttcatttttccctgcatgttttcgccttatatcctctctacaccagacctaggtactactataaaatatacaccacaacccgttgtgtacctgactaccccgtatattacccgtggaacctcacgggcccgtgaccaaggcccccccaattatccccccgtctctcttttgacttgtcatactctctatctccctctctctctctcatttattcatctattctccccacactgatcttgcgatcgggtgtggtttgtgagtcgattttctctgatacgcgcgtcgggccaacgtcaacaaatcaagcccccctatcccgaccgtctttgacatatacaatccctgtcaagtgtctggaccattccgaggaccatgaccatcacttaaatcgcatctcgaccttgatttcacacacgacactcgtttcctgccacgcctcacggctcggctttgatgatctactgtttacgctcacgacttgacgccgattgagcaccttacactccttttttcttattttatcttgcacattctttgccgttgaccggctttatcgatatctttctctgttttttatctcgatcttcctcgcctaccatgtctttcgaacccatggattccgccttcttccccgcccgctccgtcttcaagcgctgcaagcagtgtgaaaccacatcccccgcctgtcccgcatgtcccgatggatcaatatgtaccatgaccgccccgagctgtgatgcatgcgccaccactaagtgcgtttcaacgggcgccgcgccctcgaactccgggggcaccgacactggcgctattgctggtggtgttgtcggaggcgtggctgccatcgccatcgttgtattcttgatatggtggttcatcatccgaaagaagcgcctggagcgccaggaggcggagaagaacggttcattcgcagcagctcgcagtgaacgccggtccatcgcctctacagtcctaacccgtgcctccaatgtaatccaaatcgcttacattcctggtgtcaccaaccgctctccaccgcagaccccatccacccttatgcctcctattccaccgcttcctggtgcgacacccgatcaacacttcttcatgccgggtgacctgcgtgactcgtcatggacgaccactaccggccaccagagcatctcccccactttgcgcagcagtgtggccaccaccatctaccgcaacgatgccattgtcagtgccgttcctgcgcagcagatacagcggactcgggcagccgtcgtgagtatccacaacggaggacctgggtcggcgaatgcccctggagacgactcgcccgttactgtcacgattacccctgcagacgcacccgctgtcccagccattaccccggcgcaactcgctcgggcggaggctgtcaagggcaacagttcatgtattgctcgcagtgtaaccgccaagccagtgatggtgcgtggcccttcggtgaagaacaagcaagccaacaacgcgcccgctgccaaccgagtcgaagagctgtccgggaacagtaaaagcaatgacaccagcccgacagtatcaaccacaaacagcaaccagtccagtccgttctcatcggtcgaagatgaagctgccgattcttcgattcgcgacgcacgtcgcgcttccggcttgagtgacggacgtaactcccctcggacgccacccgcacgggtagaaagtccattctcggatgccaatgaggtgaaatgagctggtctgggaccaactgggcgcaacggtttttctattttgtgatttcccactatgctttctctgtatgtatggagcctaccatggctttttgtaccttttagatatgtccttccttcgggtgccttgtacagcgagtgttggcacactgagatgggattgtcgattgaatctttactctcattcattttcattttggagtatcataccttcacattcgtactgccatgagaatccgtgttacactgtcctataggcttctttcggactaaactatctctatcgcgaattttccaaaaaccgaagcagataaaatgtttaaagtaatcgcagaataaaaatgagacccttcccacttcacttctaaagtcactcttgactactagctcgcagacggacttgtgctgtctttacatggagatagtatcaccatgcttctgatttatatacttaagactagccgaattcacttaactacatatttttcgtcatacttttcgttttgttttgttttcgttttctcgaaccttgttatatatttcccagctcgaacaacaccaaacacacaagacctatacacctaaccgcccctctagcccgccccaagatcccaaagcctcttaaactcgctatctcgcttcacaagagcgggaggacaatcccattctaggagccgaccaccccccataacagcaacacgatcaaagtcgacgacggcaccaaggcgatgcgcaacagcaataacgcgcatcatatcccggatgagccgctcggaccgctcatcgacgttgctactcgcttcgtcgattaggacgatccgtttgccggccagcatagcccgggcgatgcacaggagctggcgccggccctgcgagagccggtcggcgtctagcgggctgtctagaccgcccagccgatctacgacatcgtccctcttgagctggtgcagcactgtttacccatagtaagaggttagtgccgtgtttttttgtgtcacattggggcttgggggcgctgttaaaactcacatcagcagaaagcgacaaagggcacaagtgtggatgcaaaatacccagaaaagacgcacatcaggatgaccgacatgatgatgagggcgaagggcagctcggtgtcgacagccgacatgtcctggctgaagcgattcgtggtgacttcgacgtcggtacgcgagaagaaggccactggggtattcatgacggaatggagaagccgggcgtggagaacctcggagctcgaagccaccatgacgaccaggaagagatatgcagcccctgtgatgcccaagacggcaagaccagtgagctttgcgaggagaccgaggcagtagtcattggtggcttggccggatccttctgtagtgtctgtccagaagctgagtacgagtgccgtcatccgataacttcccgtgtacagaatggtgaggacagcgagcagtatggtgtgccatacagggacggagccaaagtaatacgcatatgtggcaaactcgccgaggactcgtccgggcgattcagagtcgtcgctgtcctgttcagcatcttgttcatatcggccccgaggaacagtctcgtggcgatgctgcaccgatgcgtcagctgcgtcctgcgtgtcaatcgcgccgttctgctcgactgccagcccatgcggataatctgtatcggatcgaagttgggcgaatgacccctgatgcacgatatggccgctcacatccagagcgacgataagatctgcataggcgagtctatggatggcgttcgtgacacagaccatagttatgctcatctcttggaagagacccgtctcggcaaaaagattctgtaagacgtgctcctcggtcgccgcatcctgccctgcaaagacatcttccaacaagacagtcttcttcgtggattagacggctcgggccaaggcgagccgctgcttttggccgccgctcaacgaagaccccgcgctgcctgcccttgtcgcatcttcgtcgggaagctcgttgatatcctactctagcccgcacgcgtagacaactttgtcgtaccattccgcgtcgtagctggcactgcctaggatattatggcgtatcgtcaggttctggattcagggctcctgaccaacaaacgcgatattgccgggatcggcatggatggaacccgcttggagcgggacttctcctagaatggctcgcatgagagtgctcttgcctgagccgacaggtccaacgacgaaggtgaatctgcggattccaacagtgatgtcgttgaggatgtccggctttccgggaacccagccaaaattggctcctgatatcgctacaagcgtgtctcctttctcatcggcttagcttggatgatgatcccgctcgcccaagggcaggaacaagagcagaaatccatcgacgaaggcgagcacggcggcggacgtccgcaaccgagagaaaggccacttctctgcattcagagcccagtacaccaagactgcaagttatagagccgtgtagacgccgatcaacccctgcagttactgaactagtcagtagttgttttttcttgggccagagaaaaactagggcggaggttatcacgtgccacttccacgattggccggtggcttttggcgaccttgcgaggctgtctcgcgagccagaagagactctgtagggacacaaccagaaatagagccgaggggacgatgcagagaatggcgtcctcgaaggctggcataaagtcgaaagcgcctgtgctagcaacgacggcaaaccgagcttcgggcgacatttctaacctctcacctagctatcctttgaagccttatcaaaatactggaaggctttcattggagaagttggttatattgggctggttgcgcgatatgaaggaatctggtgcaatattacgtttcatggcgtactggcggttggagactgccataggaagggaatcggtcaaatacgtagatttaccattaacgtttgttcgaaacctgcttattggtcaggtaaaatgatacaaggtcaatgaaatgatgatcagatcatagaattgaatcttgtcttctcgttctgttgtgcccctttgtatacatcagtaccccgcttccaggtcccaacgacttccagacctatatcgtaggcggatcaaggaacagtactccgatccatagttttacactgttcctctttgacaacgacgaataatattatgaaagaagagatccataacacaactactccgtattcgaagtggcacccactaatcgggaaggtgggtactataagggccgggccgtgttctggaacaaccacgatgttgtacatactcgaatctatcattttattaaattctcattaaatacgatgcttgaagtagaggcaaataagctcctagcattggagaagatagagagagtaagccatctttgctcaaactaggaaatagggccttggctgagagtgacaagggcatatcgacaagacctgattttgaccgtcacacctataagatgtacattcttttaacactatttgacatgtttcttacgcatatatacaagcttctgcacgccttccggttgcttggttgaatgattaatatagattacataaaactaactagagtggtgattggcccataccgctaaaatatattccccgaagtacataaaccaaactgcgttcaaatccgagtccgatcctaatagaatctataacagcccgacagctcccttattatatgaatattccactcatccctgagacttttcttgcgtcttttctgacgaattatgaggtacgtcggggttctcatccaatcgttcggtaacaagctccttcagagaatgttttggagaagtactggggaacatgtcagatatatagcatgagtggaattgtctattgcctcactcacgatgtaaatgaattctcgtagtctgcccggatttgcctatctgactcttccttgtccacgatcttttgaaggtcttcagggagaggctccgaaatcgactctctgtcttcttcgcgttcaggcataatgttctaggatttagatactataaccgtggatgtggataagtctagaatcattccaggtaggaatgcggataatataggctactttgtatagatcggtggtaccgcggtagacatggagggcgcccctcacattattgacgtcacgcgagacaatccggttatctcctgaacttcgggcgacctgagccgtccgatcgtagaaggttcacgggatggtgagtcattattgcttcattatgatgtaatgcgccgaaatggcctgaggtatggatatctcggaaatatgtcggccaaaacccccctcatatcttccctcgccatcccctccatcgcggtttctcaatccttgccaatcttttctagcacagttgtacggtggccgaagtcatcttttgactaaagaaatgtccgagaaagaacaaaaagacggttcggcggctctcgggctgcagaggacagagactaaggagtccctggaggatttgggaatatcagacaagtctccaccattggacgtcaactatccagaagttggtcgtgcagagaaccctgaattccccgaggagtacaccatcgagacgaaaactggcctcgtccctgaatcagcactgaagcaggtacgctctgaggcgagccagcacaaggcctcacggcaggactcgaaagagtcaggaaagcgttaatgaccttctcctctccgacaatgagaatcatcatgctgtctctttagctgcatcatttgtgattgtctacattgcatattccatgtccatcgccaccgacttcgactcgagggatcgagcttcatttgggaaaactacaacatctcgctcgaggtcaccacattcacctgctctatcatcgtctgtggattcgtcacgcctctgcttaggtctcctttgcccgacacaattgatcaagggcctgaatacattgtctcgctgagttggtgtttgcattcaacatctcatatactccgtcgccgaatattggcgggctccttgtctgcaggttcttgtgttgcgttccggttcaggcctatcactggccggtgattgaagagcccatcctgatacagctcctcattgtgattctgtcgtcggcccgattgtttgcggttgaatcaacattggctcgcgtcgtcttgaattgttcttttgcgttaatatagcgttttctcgttgaagctattcttattatacataaatctctaattttccactatataatgacatattactggtgtttaaaaaaaagtgatttaattctgccggacttaataattctatacttttgaatcctacttgatatacggagttgtcaaaaaattcctacactttgatcagataacaacgtgtatttgatcgcatacctattctttcaatcccttaatcatgattgatagagcagtcgttaaaatagttgtgaaagcagttgttgacgatgaagtagttgatgtgataaaagtgacttaattttgttagtggtttatatacaaattgtaggtatctaccgtcttgctagnnnnnnnnnnnnnnnnnnnnnnnnnnnnnnnnnnnnnnnnnnnnnnnnnnnnnnnnnnnnnnnnnnnnnnnnnnnnnnnnnnnnnnnnnnnnnnnnnnnnnnnnnnnnnnnnnnnnnnnnnnnnnnnnnnnnnnnnnnnnnnnnnnnnnagggggggggggggtcgaattagcaatgggagtccctgtcagtcacaaccccctattcttatacatacctcaatcgttctaatcaatatggcaggcagtcgaagataggtggacaattatacagtgggaaggcttcaaacccaagagataagggaattccaggatttgcataggtacgaatagcgtcacatctattgaagtagaaagggaaagaatcgtgagtcgctagaagaaagacagatcctcacgtctagctgtttgtaaacatggaggaaaatcaagggtatataaccagaatatctagtcaacaatgctcagcatccggtaattcaagccacactctcatccagccccattccacgtccgattttacgaatcaatgcccgcttgagaagagcttcacgtgcaagactccgtgtatgccgtgaccaggaatcgacaccaataacaccgcggaccagcgcagcctgcaacgcatagagcgcttgctgtataccttgctcctcggccactaaatcatatagctgtttccctaccacggtgggggcgactaggacgtcatcaattgggggctggccggccggagtgtctggagtagcggagcttgaagcagcgccagaagcggagacagagcgggcctgcgcgtctgcaatggtagcgtcggcgcgatggatagattgctgtaggacagcggtgttggattggagggtcgcatggagagtattgagcgccgagagttccccctgcagtgtggtcatagcgccatgcagggactgtgattgtgagacaagagactgcgctgccgtgtcggattgagcagcgttagcacggagggtttccgccagggtctgggacacgacatgaaggagtgcatctttctctgggtttggcgggatgggaggcgctggtcctgctggcgcgattgagggtagctcgacttcaaatggcgaggttagaaggtcgggtgtgtcggccttgatgggagctgctgggggtggacggggataattggatgggtatggagaatgctgaggatatgggggaccaagcggttgctggtgtggttgctgggggaattgcggctgcataggcaagtgagcccccgtaggttgagcttgaagagggagttggcttaaagacccagccgcatgatggagcggcgcaccactgtttctataatacggtgcttgaccctgcgccgactggggctgccccgctggctgatggattggtgggtgtgacaagggacgaggactgcttatcggccctccagtttgggccggtggcgcgtaattctggtatgagtggattcttgggctagccaattgtgcggacacatatggttgacgagagccttgctcttttggtggaggtagcggtggggaatattgatattgatcgaccgggtgccgttgttgttgctgctgcagatgttctccagccgcgcctggcttcggcggaggcgggggtggaatctggctctgacgctggccttggcttgtaggcggagacatagactgagcttgtcttgaagatccgacaccgggtggaaggggaggtaagggcgggggtgtttgcgcagcttccagctgaggatgtggcacttgttgtctgtatcggactggtggctccttggcaaatacatcctgaagaatagaaagaagatcggcaatgttggatctctgtgaataaaatagtcagcggtctgtaaacccatatcttgcgagcactaacctcccaggcttcagcccagtgtgctagatagtggtggtacacctgtccctccagcgtcacatgttgcccaactcggacagccatttcctgcgtcggcgtcacgtaggcaattggagggtcgcgtgggtatgtatttggaatccaaagcgcaatgggaaatcgatatgtcgttcctcggaaggtgacaggcaacgtgcccacaagatgaaggaggagggccgagaaccctgtctcgtaggctgctgggcattagaaaatatgaatcgcataagaaacatatggacactcactgtagacatctgttcgaggggagagcgaggggtactgggagagcgcattggcgacatcgtggtaggtccggtttgggtcgcggtaggtctgttgtggatcatagtgatcctggaggggtttagtaggtcggataacatgaagttttcggagagaccaactttggacaggacactatacagccaattcagtgtcctctgagggaccgccatagcgagaggaatgatggaaaagggttggaggcgcgacagtttcctcttccccgcagagtttcttggcgaagtatggaccttgtggtcttttcaaaatgttgtattagaagatatattttgataggagatactatttcttagtagtcttagtctctatgatctaggtataggtgacaaggtagttccagtgtacggagcataactactaagcaacttggtgacacctccactgcgccttaactacatctccgtacaccttacacctcacctcaccatttcatcattgaaataatcttgtcttgcttttgtcccttcgtaacacgagaagatacaggttcgagtctgaataaataatagcactccttttgctgctgaagtctcgaggagcgagacagattcgctaaatgataggctaatggtctgaatcagagacctctgtcttatatgacacgtccaggcctctccagaactctatcgacaaggcacatccttgagatcctcgaatccctggaactcattgacatcgttaaaatcctcgaaatccttgagtcggggtttgtatccctggaaacccggaacaaagaaaaccaagcttgagcttcgcaagccagtgatattcacaagaaagcctgagtattctgaagatctcatgcagccattatcacccggtacctagaaattgatgggctcctttgtttcatttaatattgttcttcccattcccttagtattgttcttttactcacattgaagggcataatgatctggacctggactgattattatacattgccttcgccattgtctgtctcggtctctatgacgctggccattcaccctgattctcttgatgatattgctgatttatatttacaagtcctacaagggcttttaaaacagacctcatcttctaacatgcatacttcgacctaacttcagaattatctatgtgaccactcctttaattctttcaactgaacttcaattaccaaagtcatggcggcgacaccatctccaagtcccggattcgatccatccacccagaccgtcatcttccacctacgagatggcactgagttacccgtctcagtacaagcactggacatcttcgtcatgtacaatgtccgggtatgcatcaactacggttgccagtttggggcatcgctcacgttgctggttattcttctgcttttgacccattccgacaagcgccgttcggcggtttttatcctgaacgccctggcgttgttcctcaacagcgggcgtctgcttttccaagtcatccacttctctactggattcgaaacggtatatccattcgtctccggcgactattcatccgtgccgtggagcgcatacgccatttccatcgtggctgtcgttctcaccaccctagtcgtcgtctgcatcgaagcatcacttgtgattcaagtgcacgttgtttgctctacactatgtcgtcgataccgacatcctctcctagtgttatctgttctggtcgccctggtgccgattggattccgctgtgcatggatggttgtgaactgcaaggccatcatcacactcaactacatgtctgatatatggtggatagaaagcgcaaccaacatctgcgtcaccatcagcatctgcttcttctgcgtcatcttcgtcaccaagctcggattcgccatcaaacagcgccgccgactcggcgtgcgcgaattcggcccgatgaaagtcatcttcgtcatgggctgccagaccatggttgtccccgccatcttctccatcgtccagtactacatcactgtgccagaactggcctccaatgtggtgacattggtcgtcatctcactcccactctcgtcaatctgggcgggtgccgccctcgagcactcccgacgtaccggaagccaagatcctcaacgccgacgcaacttatggcgggtccttgctggtggtgcagaaagcttactgtctcccacaaaggacagtccaacgagcctgactgctatgactgctgcgcagactctgtgctactcggaccataccatgagcaagagctcatacaactcgcgcgacaacgatgctttctatggaatatcggttgaacacgatattacgatcaatcgagttcaaagaaacaatgagatcgtgtgatgagcacagcgctccgcaattcagagataccctcctttcatttcgatgtacaggatcttggccagacatcgactttacgcgtaaattgtttttttttttttctttttttcttcaattgggttctatactggctcaccattccgtttggctcaatctgcaaagtgtaaatgcattcttaataccaagtcatattcattatttttcactccttgctttcgagagccatagttgcattacatgacgtttgactgcattgtagatctacgagtgggtgaacttgagggtttcccatgttctttctcactaatagtaagtgtctatattgaggacaggttctgctctgaagttcaaatggagtctcaacagtaagaaagaagttgagtataccatcgaggatgggattagaatacatatatgtatgaagcttgtgcaataaatacagccagtctactgaatgcaacaaattgcgatgagcagagtcaagtgaattaacaatacataaaaaaaagccacaaatatttacaggtgaaacgctctatgttcagaaccacatgtgcgccagagccaaaggacaaaaaggagctagaaaattaatagtatccggtgctaattcagttccacatagttggctaggaatgttagaaaacgtaataaattgaacaagaaagacttgaaacacttacccggaaactggccctcccgacctccaattcgcccagaccaccattcattggtattttcagagcgctgggtaatctcaataacatcaccagctgagaatcccagatcaccgtgtgcctgagcctcgtagtcataaagagcggtgacagtctcaaccggcttactgagatgggacggcttcgcctttggaggaggcggggcggccttgctcttggcggcggaagagaagctgcctgtcgggctagcgccggcagacgaataaggtggtggagggttgtcatcggtggcggtggaggcggaacggcctcggccgatggagcctttggtatcggatctcttgctatcggatctcttgatatcgcctgccttgcccggagggcctagtttggatccagagcggcggacgccttgggttttaaagtgcacgatggtaagggcttcagcttgttcctggatattgccgcgcttctgctcaaaggcctcttccacgtcgagttcaagattgaaataggcgatgttcataccctgcattcgttcgtggagggtgtagaagacgttgagttgcatatagtagaaagactggaagagcgggcggatgaactcggcttcgagggcgaacagcttgggcagttcgtcctttagtaaatcgttgtaatagttaaactcctgggttgccacctcaacatcgttctcggctttgtatagtgctttctcgtctttgagcgatttgtcctttttctcttcgagctttttcagtgtcgcgttgcggcgatcaaagtccagcttcttgtgatcacgcttaaccgcgaccttccggatcaccttgatcacctcgagcagctggtcggccgggctgataatgcggctgttgatcatctccagctcgggggctagggcctcttggagttcctggacaatgacttcatattcctcacaggcctggatgccctcggcatttccttcgaattggtaggaggtgggatcggaggcgcgaccggagatgggtttgtagatttcggcgactgctttggagaattcaatttggtggctcaacatgcctgcgcacgcgatcagtagggagaggtatagagtggagagatcaaagagttaccattaatggcagaaaagtatttcttggactcatcgtggagcttcttggtctctcgctcgagctcatcaaagcggcgttcggcatcggtatagacagcatccttggaatgctcaccgatgttgaacttgaccttgaactgctgtggcgcacgcgcaatactcttctggaagcctttaaaactcatgatgtggagtatattaaggagagaagtgaagaagagaaagtgccaaggtggggggaaagaagaagaaggaacccaaaccttttcaatgacataagacttggccagcgttgtacggagctgatgtccagtgtggctgtacccatttccttttatactattccacgctattttgtactattctatacgctactgttctgccctatgatcatgtggcgcatatcttcttaggcacctggattacgacctacaacatacatactacatacggtagtacttcaactcctgtccatgttctatagtgtatagttacagagtactccgtacatattttagctctaaacacctcgaatggttacagtgcttacatctctactctcgacgacctcaagaactgtttctctttcctcggcagccttacccgagaatgtcctaagatcaaattaaggaccccagtccgttcgtcatcattgggccattcttccttgggacgtgcgggggggggtgacttggcaatgagatgaaatgggtgaatacaagaagtcggaagaaagagggctctaaaatgatcaaattagaatcctcaagactgttataaaacagagaaatgaagatctgatatagtcatggacgccctggatacttatacccgaaaggggaaagctcataactccgtcatgcctcaggcatcacggataaactcaattgggaaaaccccgagatctttagtcattgggaggagatgcaagtgataactaacaaaaagtcgtagcgtttccttttcatcccaccttcaaggatatcggcacaaatcatctccataatgacaagtgctgttcccactgcttggagacaggcctctgccttctccaggcgtctttcaacttatggttcccgagctcctcgagtcctcgccaccgggctgcgcggtgctcgttcttatgtatccgaaacaaaagttggccaagcccaggttaacatcgagactgccatcaaggaggaacaaaaggcattcatgaaccagtcccacatggcgccccagagcgtcaagctgcctggctcggcaacctccggtgacgccgcgttgagcccttcggccggcatcctgaagcaagccaccgttatggaccagggcacccggcccatctaccttgatatgcaggccactacacctctggaccctcgcgttctggatgctatgcttccttacctcaccggcatttacggtaacccgcactcgcgcacacacgcctacggttgggagtcggagaagggagttgaggaggctcgcgagcatatcgccaagctgattggggccgacccaaaggagattatctttacaagtggtgcgacggagagtaacaatatgagtttgaagggcgtggcacggttctttggtcgctcgggaaagaaaaatcatatcatcactacccagactgaacacaagtgtgtgctcgacagttgccgacacttgcaggatgaaggtttcgaggtgacttacctgccagtgcagagcaacggtttgatccgcatgtcggatcttgaagaggccatgcgtcccgagacttgcattgtcagtgtcatggctgttaacaatgagatcggtgtgatccagccgatggaggagattggccgtctctgtcggtccaagaaggtgttcttccacaccgacgctgcccaggctgttggaaagattccgttggatgtgaacaagctgaacatcgatctgatgtcgatttccagccacaagatctacggccctaagggtattggtgcttgcttcgtgcgtcgtcgcccgcgtgtccgtctcgatcctctcatcactggtggtggacaggaaagaggtctacgtagtggcaccttggctccttccctggtcgtgggctttggcgaggcatgccgaattgctgcccaagatatggaggtaagctctttcccattttctatttcccgtttccatcattgctgccattattacgcactgtgatagaccttttggagactaggtaatccgtgttcttggacatggtactcagttccaatgacgtcaggcgcgggcgtaatgctggcagacagatgaactctatctttcccgtcggaaaacagtatgctaactgactggttaatagtacgacactaaacacatcgatcgcctgtcgaagcgtctgagcgagggcctccttgcaatggaacacaccacgctaaacggtgaccccgagcaccactaccctggctgcgtgaacatctcattcgcctacgttgagggtgaatccctactgatggcgctgaacgacattgcgctgtcatcgggcagtgcctgtacctccgcctctctggaacccagctacgtgctgcgcgctttgggcagcagtgacgagagtgcgcacagcagtatccgtttcggtattggtcgattcacctcggacgaggagattgactacgttctcaaggctgtccaggctcgtgtatctttcttgcgcgaactgagcccgctttgggagttggttcaggagggagttgatttgaacacgatcgagtggagccagcattgatcatattaattttattttgagagcaaaagcccattagggacggcgttgaagtgtaacaacatcggatttgtacagactggaaataatcaccacgcaattaaatactctctatcttccctctaagccccgatgccttgtacgtcacctggattacctcaagggctccccggggtctaagatatcactcgagtaagacctatgtcttgtatgatcagtctgtaatatgaacagcatttaattaatttggaattttctctcggcccaaaacccaccgtagtctgaaggctgtctactctttggcaaagaagttaaatttatctaccgagagtcaattcgtaggttgcacttgatttccacgatgcatctattcctcatcctttgcacattcgggggtaatgcagccgctctccctggtcaccgatcaccggagcttcaagtggtaacctcttccggctctttgaatgggatatacaacgactcagcacacacagtacgggcatttcttgggactccatatcgccagagttccatatcttatacggaagaatgctccaaatagactcatcggagtacgtatgcacctgtggacagggattgccgaaggaggatgcatcgatggggctttggggtggtgattttgggcgtcgtggtgcccatcgcagttcttggactgggggctcggcatatgtctgaagactgtttgtatttgaatatctgggcaccttctgtcaagcatcgaggctttaggggacttcaaaaagctgcagtcatgattttcattcatggagggagctgtgacactggtgctagttcggttgcctactacgatggcacgaattcggtacggaatcacgacgatctgattgttgttacttttaagtaaggagatgctgggttttggctattagatttactaaactctggccagttatcggctcaatgtttcttggatttctgaatgccaggtatcgacccttccgagcagaatcttggactcctggaccaggtagatattgagaatctgtggttgagagagtacgaatgaactgaccatatttagcgattggcaatccagtggggtcatgaaaatatagccgaattcagtggtgatccagataggattcttctgtttggtcaatctgctggagctgcttcggttgatatccattcatatgcagtgagcacgtcgtttctatattggtgttttcatatatgaataacctctgatagtaccctgaaaatccgctcgctagtgcatttgctcttcattccggtaccgctccgttactggtttaaccattcgagtgaatcggcaggtgcccacttggaggtatctataccatggatattttaccaatctcagcccacctccatggcttggagcatatcacgggggtaagaagaaagcagctatttgcttgctggtttgattaagagcatgatgacagctgagatacctttggtttttggaactataacatgtctatgatccctttgtcagccaaggttagtgtcaggcattgcgtggattgacgaatttcttggggcttgggttgcatttgccaaggatcctcgtacgggactgagcaaatatgggtggccagcgttcagctttgatcgtagattgatgttctctcgtttgtgatttgaggctgatcatgggatggagccaaccttgatcaacctcgctctgaataacactgttcaggcagtatttactgggagttcctgggatctcttgtgaagtcactcggtctgagctgtaagtttggcggagttatattgtgctacgatgggagagctaggtatttccagactcgtttgaaatgtgttccatgatatttaccgagccttgcatggataggagtctaccccgtatacgtacgtaccttgaggcctatgatgtatacctcggacctcggccagacttattattaatcagtgatgccttatgcatcaggcatatattcttatttatgaatatggacctttattatgggtaggaaagaaaagaaaaaaaaagaaggatcaaatatgcccaaataccaaagtagcatgaggtccgatctaaatccccggctatgcatccttcagatcaaggttggcgatcctgagtgaagcgaattcgaagccaaaataagcgaaaagggcgagaataccgcaaatggccctgtcggccgtgtcttggccggtttaggccctttgcctggcactcagtttcgccttcgcttaatttgcactccacttgggtctcgcggatgcacccagtccctcttggcgtgctatcatttgattgtatagccatataaaatgtacctggtctctctccctgatcgaccggatcgccctgctcgactcctctaaaacttccccgaggtcctctaaaaagagtcactttccctcctatgtcggagcccttgcaactttattattctcgtcccctttatcctattgctcttagttaacgactaacggaatgattagaaatggtctgacggtcttacccatccagggatccccggtgaaattacgtgctgaactgccggcgaaaactctgactatttagcccagatcgtgccattttcttcatgcgacgttggtagaatccaaatattattctctttctcttccgtcatcatccgcagacatccaacctggggaagccaagtcatacatctggctccggattattcccggtctctctggtctgattttctggtataatcccatataatccttttgttccattttcaacttctcaatctctcaactctgattcttgcatttattatatttatatactttgaacccttgaatccttgaatatctgttatgttgtctccggtgccaaatcccgccgattatggaatcactgccgattatggtttcctttccgcagaacttcctttagaggtgctccccgatccttactacgccgaatgggagatgataattggcaatctccacccattgatattgagcaaacggctgcattcggtcgtggacactctgcctatactttcggccacgcacctgcagacggaggctgagtggcgtcgtgcatatgtcatactggcgttcattctgcacggctatgtctggggtggcgattcacccacagaggtaccggcccatcctattggttgaaaaagtagatgtactgattctttaaaagaggattccacctcaacttacagtacccttatttgaagtctgtgaacgactcgaattaccccccgttgcaacatatgctggagtctgcctttggaactacaagccgatcttctccgatgagccagccaccagcctggataacctagcatgtctacaaaccttcaccggatctctagatgagcaatggttctacctagtgtcagtcgccatagaagcacgtgggggcccttctattcccctgatgattcgggccatcacggcggcccgcacaggaaacagccagactgtcaccgagtgcctgcagagactagcggaaatcatcgatgagaccaacacactgctacagaggatgtatgagaactgcgatccatacgtcttctacaaccgcattcgtccttatctagctggaagtaaaaatatgtgtgatgccggattgccaaatgggctgttgtacgacgacggccacaatcccgagtaccggcaatacggagggggcagcaacgcccaaagctcactcatccaattcttcgacattgtcctcggagtggaacaccgacccaccggtacaagtcgcagcgacagtgaacaaagccccgaagccagcaccaaatcccgaaacagcttcatccacgacatgcgcacctacatgcctggcccccaccggcgcttccttgagcatatcgactcggtagcgaacatccgctcctttgtcgaggcgcgacgcggagactcggcgctgtgcattgcctacgatgcctgtctagccatgctgcgcgtgctacgtgataaacatattaccatggtgtcacgctatattatcttacagtcccgcagctcacgtcagcctgccaactccaactccccagcagcgacgaatcttgcaagcgccgctccgaccgacaagaggaagctgcggggtactggtggcacggcgctcatcccgttcctcaaacaggctcgagacgagactggagagcctgccattgatgcctgggcacgacggttgctgagcaatggccctgcagataaaaagttcgctgcgctgagcaaggttggcgagcatgcggatggtcatctggaggttgtcggtctctgtggcacatggacagctgaggaaaacgagggtggaatttgtcactggtagtcgtataactagtttcacgtttgcgtttagtcttccttcgagcgtggcattgcatgggatttatgccgtacgcggcgactggtgtttgggaacttgcatgaacttatggttattactatgctgtataaaatacattccacctggctgtgagaaagataatgctttttttgtatggactatattgtacttgtacccatagaccacactatagaaattatctttcgatacccctgtacgaatcatcaacattcatcaacattgatgtaatgacgcttgtccctggcctgaacaaaactcgtcatgcacgcgcgtatacctgatattcacgtgacgtgacatcatccaatgacgtagttcatcacgataatggtggactttgtagaacttcaatcttggaagaccacattggcccattggagaatgccctggaacatgtggcttgataacaaaatgccttgtgtatataagtggccttcctgccacgactctcagtaactaattcatcaaccacttcaatcctcaaacatctctcatatcttcactaccactaccacttccaaccatcatcatgactaacaacactggcaacgcctcgaccaatgagtcgtacctcgagcaagcctccgatcttgcttcgcgcgccatcggaaccgtgactggcaccaacacctccactcaggtaagcaatccactttaatcccaacatcatcccactgtctacaacaactaaccctacctcagaccgacgaacacaagcacgaagccaagcgagacgatggatcctgggaccagaccatcggctccgccaaggagtccgtcggcaacctgatcggcaaccagaccctgcgccgcaccggagccgagcagaacgccgccggaaaggagcaggaagccaagagccagctccagaactggggcgagggcattgagaaccgcgctcagggtgctattggatccattggtgctgctgtcactggtaaccgctccgaggaggataagtaccgtgacttgcatgacgagggaaaggcccatcagctcagtgctgaggctgatatgatcaagaagaatgctgcttaggcttgacttgagatgagatcttgagtttgggtttttctttggtcgcttgtttcattatctttctttggtcaggcctgttttattatcacgacttctacgatatgatatccaattgatgccatgtttttattttacttctatcttctgcttgtaacagtgtatgatatatatgtaacgagtcaagttttataacgccatcacctaactacagcacgctttacctgagaactcttcctctttctctatttgagctatggtaattaaggcacaggtctcgatacatgtgaattctacatggatcgaccgcagatcatccagcccctctatgcaatgctacatcgacatcccctgcatttccccgcaaagaagtaataagtaatttcccgaggaccagacagattggcatctgattccgaggctggagaagatctagaaactcggaattttacgaattaaattagcaagctatttggggactaattgtatattccatgccactgtagactaatgcggagagatcttagccaagcaggttaagcatttgatataccgactctgccccatctgagtacctagtctgtataccttttgtctctttcttctctgcacttgacaaaatgaaattcacgacagctttcctctttgccgcaacagcctggggtgttcaacaccaccaccgacgagataccacaaataacggtatcaaccttagtgcaatcacgagcgcactgtatgtgactctttccctgaatatctttcaacccactaacaatcccacagtgagaatctaatggccaaccaaacagccagcgcgaatttcgccaacatctcgccgccgcccaagtcgctcatccccgagatcctatcagtcgtgcccgtatccgtcatctgggaactcatcaacccagcggagcgcagttccctcgccagccaattcaaggccggtactaccccagcctggtacagcgctctcccatcggatgtgcaaagctacatgtcggtggtcaagtcgcagatctcggcgggggcattgacagccacaacgtctgagatcaacgctgtggcaaatacagggactgcagcgactgttacagcaacagcctctgtgaccggtgccactgctggaggattggcaagctcgacttcgtcgaagggtgcggctgcacagcccacgggcctgaccgtgtcggcgttgggggcgctgggtgtgcttggactggcactagctctgtgatggaaggatctacacgaattgcgtactttttacggagtaaatacgattgtgatgagagatgttttccgaaattcaaaagattggttccgtttacacgtgaattcgagtataattatttccttttcgcttatcttttctatacaatgcacgtatggtggagctcaagatcgttacattaagcacatgccgtcccttttcttatagattgaatttaatatagaagtatgcaaatggcatcatggtataaagtatatgcagggttcttttgtagacaaaagggacagcctttgccgatcactactaaaccgaacctctcctccgaggttcagggcaggcattgtgagacaagcaaatgtcgctaaccccaaaaaagggcaaaaaagggatctactcgacgatcttccactaaaaggcgacatcttgaggggagaagagacttgcggggaaatgctcgtattggattctcttcttctccattcgccattccttccatgtctctcacatggcattgcttatccctcggcctcatttaacatctagatcatatcgctattagcggcctcggacaatttccacaaattacgctaatgagagttacatctacagaaaacagaccagcctcctataagacactggatgtgtttgcctcttcttctctgctcaatcctcacttcaatataataacaaaatgcgtttctctcggatcctgttccctttggcctttgcccccttggctctagctgctcccgagcctcgtcccaaccctgtcgctgcgccagccccggccaccactggtggtctactagaggagctgcctgagcttcttagcggcgcccagagcctcctgagcaccgataacatcaacaagttggatactatcctcgagggtgcggccaagttgctcgctgccgataatatcgatatcttgcaggatatcttgacgaacgcccacagcttgttgaccaagagctttgtcaataacacaactacgctcattggggatgctacaccggtatgtactgctttttttgcttttgctttctgaactgtgtactaatgtaatatagctggtcgaggatatttctaagcttctgggtggtgtgctaggatcactgtgagggttgataaaaggaatgaatcatgataatcactttagttatctttttattgcagttatagcatctcttgaatgggtgtatgtaaacggaaattcaattgaaaccttcaaaatacacaaaacaatcatgtctttcataacgatcgggtatatacagaaaaatattagactagaacacagaatcacactcaaccctccttcctattcatcttctccttgagccgatcctggtagaatctcaaagggtatgcccgccatttatcaggcatagccggataaagagcgaccgagaatcccatccaagtacgataaagagcccgagtcttaaccgtcgagcgcagaccgtaggcatcacgcagactcggaggcagcatctcaaccgtaatgacatgcaaaaaaggcttcaaagactgcacccagcgcggcatatcatgactctcacgaagatccttagcaaactgagccgcatccgacgagacagtcaaccgatggacctgatcatcccagtaagaccagaactcctgccgggattccggccacgtaccggagggaacgcccagacagtccatgagcaaggtatactcgccatatgcgcgctgagcactggtgtagtccacacggccgtagacacgctggtagaaatcggtcgcagtcgcgtacagcgtcgccgccatccacagctgcagcggcgggtgctcagcgaatcgattcgagcggccgcctagcaggggcggcttaccatcctgcaggaggtcgatgaggactttgcgctcgtcgcgggtgccgaagaccagacaggagatgtagctgatattggcttggagagcgtcaataagctccgtggctagctctttgtggccgccgtggttggcgcctgcgtcgcggatgcccggcatggcagcttgtagtagtagcgtcgcaccggatcccgcgaagaggatgccctcctgcagcatttttgggaggacctctagttgctctagggcttggagccgggatgagacgttggtggtattgcttgcggtcgcatcggagccacgtgggtaatcttgggatttctcatccactggggagacgggaggtgtagggaaagacatggttagagagttgtcgacagttgtcaatgaagctatctgtgagtatatgatcccattaatattgaaatattccaatgcttccccagaaatcccccgcaaaaccccgaaaatgctccaacgactaaagcgttgatcatctcggcccatgtgaatagtgtcgtctttcttagaataagccgcggctggcagcagatcgccatctcctgaagcgctgatccctcccctcttctgcgttattcaccaaagaaagcaatcctgctccgacgaggagcccgctttgttcctttttgtctttttgtcttttttttcttacccacggggtcccaccggtgcatggagaggagacgaagtccgggggtgctttgcgctaaaatacatatacgcagaaccttccccttccaaggtcaattgaaattgtgcgatcatgggtaaaaatacagatacaccagcatatctgacttcagatgatgccaaatacactctgggtattcatcgtggcccgttgatatccaagggcgatgaaggcgcccagctcgcacatgtcgagtcagccgggggtctgtcattagagacgaggaagctgaagcgcagtgagaagttccaacgccattggaagcgattctggtgtctgcatcttttagtgactgtcatcttcctggcgattttcctacctgtcttgtgagttgcaagtcctcctgcgaataccaaacaaatactaattgcaatcagtttcctggttgccattccagccatctcacaaatggtcgtcaacaagtccgacctagtattggtcaatgccgcagtgttaaatccacgaccggacaagatccaattgacgctgttgtcggcattggacctcaaaatcgcactgccagtgcgcattgatccgatcacgttagagctgtttgtgcgtgataccggcgcagagaatgcctggggccaggctgatatcgacggcaaagtcgtcaaaggcaacaccacgctaggcgtgaccaaggtccagacgccactgaccaatttgaccacctgggaggagtacgtgcacaatgtcgtgtttgagaaggagactgcgctgtcagtcaggggcgtaaccaattcatacttgggtgtgctcaagtccaaggtcactatggacaagaatataatgtcgccaggtaagcgaagaaaaataaatcaccctagaagtgaatctaaccccattagtgctggacaaattcaaaggattcagtatctccaacagcgggctcgttccagcccgcaaagacggcacaaacctaatcgggaatgtctcactccccaacccgtccgtattgactctcgatattggcacgctcgtcctcgacgtgaagagcggcgacctcgtcattggaaatgccaccgtcaaagacgtcactatcaaaccaggcgacaatgtcttccctctaaccggaatcctcgacatacacacaatgattgagcacctcggagaaatactcgcgtcgcagacaaaggccctaacaaccggaaacttatccttggatacagtaacccgaaccgtcacctggaacggcacgctggtgccatattacaccaatgtaatgaaacagctaacgctgacggccaacgtgccaatcgccgatcttgttaagaacacagttcagaatctgcttagcggcaatgaaagcctcaccgacattctcagctcagcaggtgacacaagtaacttgctcggcaacctcacgagcagcaatggtgacagcgatacctccgagctcgcctctaagatgaaaacgagtattgctgtgcgcgatatgttccataacacgcacccggttaaacgggatctaatcatcaactcgctggctgggatgtacaagaagctgtgagctgccgatcctatttcatttggatttttcctatttttcctatttttcctatttttcttttcggcatttgctttttctttttcttgtcgaaagggtctccggttctgggttctgtgtacatggttgcgcgatgcttactgatgcttatatgatacttgattcccctttgggttgtggcagtggtctttcatctcgaatggcgttgtgggagtgtattgttgtctttctctcttgagacataaagaggggtcttaaagatcttgtttttcctgtcgactccatttctgaggcagtgcatcggctctgtatactccgtacatggctgcctgttcgggctcgggtcggtgcagatgataatacatgaattataaatcaaatgacgatataaatagatggtccttgtgtcgttagacttgcatattgtttcactgcaatgggcagtcagcttgacaaaagcaccgagcaggttgccaattaacttatccgaaaagctgtaggtcttttagttgctgaattgaatgtattagaatactaatgggtccactctgtagacgtcaacctcagacgagattccagttctggaaaatcttatagaatggagcacatatgcatctatggccgtggttccggatccagggcccaattgactgccagtcatgttcgatgataaatcataaacgatgtttgctgcccaaggcgtcctggatacccgagttgaccgagtcgtcgtcttgtttagtgctgaccacctcgtatactaagtttactctgtgctgatttaaattttaacttggttttgttaacattgagtgtgggtattgacctatcgtcttgtacagataatcatacctgaccggttgaatcatggaacaagccccttccaatatggatcccttatcccacgtaggtagtacccgcgtctgatacccaggaagaatggtggtgcctcttccaccaaattgcgcgacggaaaatacggaggcggtggcttcagcgtctgtgggaacagttcccggggagcccagtgatctgcgggagaggtagcagtaggaagaggcgtagtaataggaagttgaaaattaggatcaaagctaatgaggacaagagcttgttgattagggggaagacccggggcgtcaatcgagtatataatcgaacggtcgtctgcaatgcttttcacagatccagtacgcgggcctggacagagcaattgctgtaatgcaggcggagcgtcttctggaggccacatgtacacgccacgacattcaaagcgttcctcggaaccttcaacaggataaccatcttggtccacctgggtgggctggaacagttggttgcgaggtccctcaattccctcctcgtcaataggacatttgcgcttgcgcgacaccgtacgcaaccgaatccgatctcgagaccgtagattatcaccgacaggatcgttaacaatatccacaaagctggatgcaccgagatggtaactcttgtgtttggtgcgagctgcgatgaactcctgccgcatggtagagccgggctcatactcggcatggtaatgccgccgcaacctcttcgcaggtcggtcatcgtaggggtgctctgcatccatagatacccagcaaggactttgtgtggcgccttctacaagaggcgctagagcttcttctggtgtgggaagtggctgtgtgtagtatgtacggtggttttcactcttgccatcacgccactcacggcgacattcaagtatgactgggcggccagtcctctcatccgtgcggattgaaagatcagtccacatctcattgatcgggccttcttgatgctctcggcgccacaggcgacctttccatctgcggtattcatcgcgaggggcttggcagaaccaatagtagaaagaggagtgcacatcatcgtctgcggcgtcctgcgtcgaaactgcatagagatattcaccatgcatctcaaaacacagtgtttggccaagatcgccagcgaccactcggtcgagttcgaagttaataccttcatacgattggagatccacaccagtaatagaccacgaaccctccgcggaaccatcgccggccataaatatgccataccagatgtaggttccgcagtgtcgcacaaaaaccggtgcggatgctgggattggctcatggagtaggaaccggctccgtccctggtggtattcgcgccacgccatgttgaccacgagcaatgcgtcctcggtcgcgttcgcatcggccactcggaagatgagaatgtcatcgctgtagctcaatagcgtaacccggtcctctgcacccggctccacgggaccggtttctagcagccgtgggatcgcatcacggaggtccatgacacgctccctgaataccgtaccatgtaaatacagcagacggatccaatggtcagaacggtaacataagtggccttggttgtaaagaaactcggacccatagcctacgcagaccgccgagtacggatttgctgttgccacagcctcgtggatcgcaagccgatgcccaacagcctggcgaaaaccggactgggccgcgagggcagcctgaccttctttgctgtagcgaaaaacattctgtaagccgggatcagccttgtaattcaagcgaggggctggcttggcttacctcgacggttttgcgggcgatctgttcacttcgcgacagatgatatagggcacggctagtgcgactaaggtttataaaatcacagtcgtccagcagcgttgcgatctggtagaacacatcatatgaaagagtgtccagactcatggctataagtgccaaatagtctgttgatttaaatagtctcaagggagtgtctcagacagaagggcaacagccataggaaaggaaaaataaaacaaagtccatatcgaaggtcataaggaaagaacgagatttatgtcagagagaaagaagataggaggaaagaggaggtgagaggctcaagtcatgaatgtcctaaagaggaaagaacaggcccacatgaaaaccatggaaccccttcgtacaaaaccttggatgctggcagagcctcaactagaccaaaaatggaatgacaaaccaattgtaaccttggagccttcctcgaaaaacttatcgccatggcttttacagtaagaaagcaaaagcagacatccccggatcacggagcacgcgatttggcaggatcggatccttgaggctctgtttttgttttcagattacgactaacatctccgaaagaatgcggctcatccgtctccattaggactaagcaagtgccggatctctcgtaacacgggttaggtggggttcgcaggtagccaagaatcttcagtccttggtcctatcggatctccggtgtgtgtgacctccgtgaataaagcgccctggtaatatccatggatgggctatacgtatacttcgtaagtgtttcaaggtactgtaacttgacgcatcctacatcatctagttatgtaattgtacagcgccccattaaaaacgtctctcgcaagccacttgggggcaaaactagtctcacgtacgcattatgcatgctaagttgccccggtctattcttgggcccctaccccgtagttcttcctacttctactcctaaggtttcctattgatgtcggaatcaggtgacgacatgcatagtcacatgatggccgaaaagtcgctgcctaacttacagcctgaggctgctttgtttcatgattacacattagattacgcagtacaacgcatggtacgcattactagcgaggagggccattactggagtcattcaagcgaattaaagtgatttacctgcagccctaccggtggatcccatatctaccaatctccaaggagtgttctttgtatagtccgtacatgaattgcccggggcacccaacacttgtcccaatgggaaagtgaaaggtcccatctgcgtgtgcgtgacccacccggccagccggattgcttttaaactgttcaacttcttcgtcttccttttcctctcttccatcaggagattataggtcgcatctttgaagagatgaattatccaccgaggggtccacctccaggacaagggcctcccccatggggaggatatcaacaacctccccaatggcagcctccgcctcggccgtatcctcctcagccctacggtcatcgaccccaatcatcttattcgggtcctggtcattccccctacccatcagcttatccccaatctcaacctcagtatccgcaccctcagtatcctcagcctcaatatcctcagtatcctcctcaatccccgccatacggccccactccacctcctcgtcctccctcacaccagcatactctgagtgccccgcagaatggtaaacttctatgccaagaacccttggcggcgtcactaaccgttgacaggatatcctcgtccaaactctccgaatctgcccccaaccccaccccataattctcagcaatttggtggaggtgctccctcgaactacaggttccagtactcggattgtaccggtcgccgccgggctttgttgatcgggatcaactacgcagggcagcccaatgcactcaaaggctgtatcaatgatgttgctaacatgtccaacttcttgactcggaggtacgggtacaagcgtgaggacatggtcattctcaccgatgaccagcggaatccgatgagcatccccaccaaggcgaacataatacgcgccatgcagtggctcgtcaaggacgcccagcctaacgattcgttgttcatccacttctcgggccacggaggtcgtactcccgatctggatggagatgaggacgatggattcgacgatgtcatctacccattggactaccgcgtcgctggccacattgtggacgatgacatgcatgccattatggtgcgtccactgcggcctggcgtgcgattgacggcgatcttcgattcatgccactcgggcactgcattggatctgccgtatgtctactcgacgcagggcgttctcaaggagcccaatctggccaaggaggccgcccaggacttgttcagtgcattcacttcatatggacagggtgatttctctggtgtcgcttccaccgccatcgggttcatcaaaaaggcagtcatcggcgaatcggcccgtgagcgcaccatcacgaccaagacctctccagccgacgttgtgatgttttcagggtccaaggacacacagacctcgtaggtggcgttttaaaattaaaattaaggcagataagaatccaaactaacctcgaaacagggcggatacattccaggacggacaggcgcgtggtgcattgagttgggcgtttataaaatcactggaacagtggccccagcagagttacctgcagctgctgaacacgattcgaaatgagctcgagggcaaatactcgcagaagccgcaactcagctgcagccatccccttggtaagttatttttcagcggtgtgacccgcgcccctggctgactggagatcgacagaccccaaccttcgctttgtgatgtaaccggggatttttcatccgagctgttatgacagacatgatcgacatgtagcaaatgaatcagctgagacttccgactcccgagttccggtgcggggaagagcctgtaaccttggcaattgtgtagtattgtagataatatgtactacctgatactgcggaaaagaatcgaaaagaatcgaacatgatggaaaatatatactagatgtattgtacggagtctaatatagtgcaataatagcacggaatacggtgcgcccgcatctcccaaacgtgtgggctcgtttgtggctgtggttctctctcctgtgcctcagctcggtggatctgcaaactcaatgggaaagattttttttttctcaagagcaaacccaaccaacatacatagacaatataggtaactattcctcccaacccttccctatctaccagtaactgtcccatcccaatgcctgatgtctaatgtctcacgtcaaggttcaagcgtttctatagaaaagtatagaaccatggcgccattacccccctgagcggggatcgggccaatcacaagcccgcaatccccagttcccggtgggaaccgcggacgcactggctctgccccttgggaaatgtcgcaactcgctatttttcgctttcgttgcgtatgagcgacgtgttggaatgggatacttcacgcaacgacctggagaatgtccgttgcacacggtcttacgaatatcgtggctttggtcagccgcgtcacattgggatcgaagacaacgtgttgccagatctttgagacatgatctgatcaccccacggcggttttttccacatggatggaccgattgtactgtttatacaacacagtatacaacacagtatacttcctatagttgtatgagcaaatactatgtactcctatactcctagtcaagacctactcgaatctcatattcagcctaataatataaaaacaaaacaaaaattacaagtcatctaagtgttaccgaactaaaatgttgatgtctctctgatccactttcggtctttttcagaattccatctgaataccctttctgctcgcattttccctcttcctcttatttccctcttcctgcaacatcacagccttctgccgccatgttgttaccgtctacgaacagttcctatacttccagcgtctcctccgagccgcatctctccccataccaacatccgccgacatccactttttcattgaactcccgccgaaccccaatgactgtgaagtaccctcgcttctactcgtcccccatggaccaagaaaccgacgccaccccggtacaaatctacggcctggagcagcgagaaccctccatccacaggggatcccccaaactgctcagtcgagtctcgcacgtcctagacgacatccgcgaagacctcgtgatagacgctcaccaaaccacggagaagctcaagcggtactcaaccatcaaccacgacggacacggtctcagtgctcccccgactcgcccagagggcccgatgacatcccacgggcccccgcggtcgcggccaatgtccatcatctccttcgacaactggtcctcgccgactgggagaatgagccggctgtcccgccggttctcggtcttctcttctcggaacaagctcaatcgctccaaggaagctagcatatcttcgccaaatctgatcggttcctcgactcagtacgaataactggaaattatcatatatgatcatcatcaaaagagagcaatttcagtccccatcggtgatcatggggtcgacgctcgagccgtcgtacattgcacggctattcatacatacatgcgcaaggggtgttccggtatactcattcttcgtttttgcacttgatgttttttttttttttttctgcgtcaatttttgcggtgggcagcgatcattttcattttattaatatcgctagttcatgtgttgaggttatgtgttgtttctacttccctctgcttgacttgcgcatagctcggtgtttgggattttgatttttggccttggaatatcgattcgcatttccccccccccccgtccccttgacatatcagaataatatactgagtatcatatacagaaccccttgaaaactaaccctgccctcgagttcaataaaatataacgctaattgcgccaccatgcatttcccaagctaagcaattgccggtagactaacgtcagcccgttagtcaatgcctaaaaataaaggctggaaaaagtccgagatgacgtattttaaatccgaccgctctctggatctaaaacaaacgcctcgaactcgcactcgcactcgcatcgcataacgtacgtacccgggttttctgcaggctgtggagaataccgcagatgcgatgccatgccaagatgggaagaatgtcctggacgatgcatggtagattggctgctgggtttggaatggtcctgcattgtcgtttggggctaaaagaagaatggccctaatgacaactagcgttggacagggatgcaggaatagactgggatcaaaattaaggagtaagtagatctctgcgtctggggtgggttcgtcgctatttactttcgatactgtgtcctttgggtgtgcattgatttctgaaacaactagctgctattattccatacatcctctccactgtactactcaatgcctatcatcaactgtctaatactcactgcccctctccctcgatccattccacgtgctcgcgctctgctgtctcgacaggcataacccccttactaacagccattctctcgaactcctcgtcttcacggtcaatgtatttctgcgggcgttttcgacaaatggtatccggatctccagtcacaatcaacgatgggttggtgcggtaataggcatcaagatcctcaagactccggttggctacaataacagtgagtaagaggataacatgcgatagctctgaacgtaacagtctccgggtagaagaagtagaggataggcaggaaaacagcattagacaccatccagacaatccaaaacttccacccaatattctaaatcccgatcggggtgatctccacaacgatgaagttcgtaatcctatatttgtcaaaacacagccaacgatgtaaccacaccacccaggcaccccgtcggtataacatcaattttctcaacctttgggcgcttggcacggttaacaccaccaacccttgaaaaataggcagagcttttcatttaacgtaatcggtaagcgagccggccatgtaagccagccggccacccaacccaaaaggcgtccatgatttagcacttagttagttcaaccacccactatgccaccaattcgctcccaatcctctagaaattcaatagagtaagagggtaggattctcttagctatttaggcttttaaaaataaagaaatctcttcaattcgcgaagtagcgcgccgttttaatgtaccacgtttaacgcttcaagaccgattatagggccactaaaatcgcgcgatttctcgcgtaaatttatctaaatcaacagaaattaaggaggaatctcttgaaacatagattctttctatagatctacgtgttttgctctccgagttagtaaacccgcaatatgaacaaatgatttcgtgccttctgctcttgatgaaaaaaatatccttggggagaaacctgggagctattgaaaacggatgtatataaatgtgtaacgtaattctcatcttttggtacattaagcgcatttggacaggcaggctggttcttcgtacagctattctcgcacaaaagagtgccgagatcaaatcaggggttgctatcgacactcaacgcatctgggtggttgatggcttataccgtaatatcgatgaaatcgtagaatctagactccaaagcggaactcccgcaccttcttctggtagtagaaagatgctaacaacccagtggcaccgagagccaaaggcatagcagccctagcctttgtcttaataatcctagggatcgcagagctcagaaggaggatgctgtttcccagggcgagctcagtgccgtagtccttgttctctttgatcaaataacctggtaacatggtcagcttcggaatattctggcacacccatggtacttaccggaataggcatatgatagaccgagtccaacaccggcaatcaaagaaggcgctgaccgcgttcgtagaaacccaacggtacctccgataggcactactttggtcagaaatatagcaattggtctcgttgcacggacttacgaagagctgcaagggtaaatgaaggatgttcggccatgatagttaagtacttaaaacaatgtagttgaagggtctgatgcttcaaaatttagaaagctctcaagtgccaggggcgcgtagatcccgctggggccgagctccgatgagtcagcggaacacaggacctgggaccatcgtagagaatcattttgttaacgacagccatttgttattgtcaattctctaaatccatccagaatttatggattaatcatacagtagcatcatcattcactcttatatactgaccgtaacattaatgattttatactttgattcagcttgggatctaggaaggagctgttgtttcatgatctccatcaccacgccactcgcgtatgtcacttgcctcctttacattctataatccattccattcctgtaacaagcacatacgaccatagggtgtggaaaacagggcttcccgtccgctcagccgtacttaagcnnnnnnnnnnnnnnnnnnnnnnnnnnnnnnnnnnnnnnnnnnnnnnnnnnnnnnnnnnnnnnnnnnnnnnnnnnnnnnnnnnnnnnnnnnnnnnnnnnnnnnnnnnnnnnnnnnnnnnnnnnnnnnnnnnnnnnnnnnnnnnnnnnnnnnnnnnnnnnnnnnnnnnnnnnnnnnnnnnnnnnnnnnnnnnnnnnnnnnnnnnnnnnnnnnnnnnnnnnnnnnnnnnnnnnnnnnnnnnnnnnnnnnnnnnnnnnnnnnnnnnnnnnnnnnnnnnnnnnnnnnnnnnnnnnnnnnnnnnnnnnnnnnnnnnnnnnnnnnnnnnnnnnnnnnnnnnnnnnnnnnnnnnnnnnnnnnnnnnnnnnnnnnnnnnnnnnnnnnnnnnnnnnnnnnnnnnnnnnnnnnnnnnnnnnnnnnnnnnnnnnnnnnnnnnnnnnnnnnnnnnnnnnnnnnnnnnnnnnnnnnnnnnnnnnnnnnnnnnnnnnnnnnnnnnnnnnnnnnnnnnnnnnnnnnnnnnnnnnnnnnnnnnnnnnnnnnnnnnnnnnnnnnnnnnnnnnnnnnnnnnnnnnnnnnnnnnnnnnnnnnnnnnnnnnnnnnnnnnnnnnnnnnnnnnnnnnnnnnnnnnnnnnnnnnnnnnnnnnnnnnnnnnnnnnnnnnnnnnnnnnnnnnnnnnnnnnnnnnnnnnnnnnnnnnnnnnnnnnnnnnnnnnnnnnnnnnnnnnnnnncgccggtgagttagtagttgggtgggtgaccaccagcgaatcctcactgttgtatgtttttttcgaatgctatttatatagcaatagtcattataatagaacggtaaaatgcggtgcccgtttgagttgctgcagcgtcattcgcttcagggttgcgccgtaggttgtagcaaacacaaacagtttgccctgacgcaatcaatttcaacttttttgtgcttactttatgttatggtgccgcaagtctccctaatcgctgatgtctgctgcaatagtgcctttgacctttgaagtgcctcgagcgtatggttataaagtatgagagtatatgacccttctcgatcaaatctctattctttacaaaaagaagcaattcatgccaaacattaaatcattcttttgatattatagttataattcgacaatcatggaaaatcttcccactactgcgaagacacacattgtccctgccgcccaaggctacgtatttgaggttatgaaaggggagcgattccgcattgttgacatacacggtctccaaattgttgattttatggcttgggttaacgagccaggcctaaaagagcatgttcggatgtcttacaccaggttccgactgcaaggtgtcagtcccgacattggggagcatctccgcaccaacctcgacgctcctgctctgactatcattgccgatacctgcaaagtccacgatatgacattcatgccctgtttcccggagatctatgctgaatgcggtctggaaggtcatcggtcctgcgcaatgaatatcactgaggccatggagccatatggtattacttcacggctcgagcttcctgacccgttcaaccttttcatgaattcgcccaattacactttgaagcctatcagcaacagcaagcccggagactaaattgagatggaggcgctgaaggacttgattatcgggatttcgtgctgcccttatgatcttgtgagtcttctgtgatcaaccgagcgtgaagctcaagtatactgacctctcattttttcagggaacctacaatggagacagacgacccccatcgcgattattacagggttgtaatgagtaccggtgcagatcacccaccgagtggaagtataggctctcattggctacatcatcatatccaagagccccatatcatactaagttgatcctacgcaatgtgacaataatcccgaaataattgactggtgtaacctgtttcatctgcatccctcgtagaaatcagtctaaacaaatataacgcgcctataatccacacaaaagccttaccataatcaatgttttacttaatccagcgtccttagaataaaaagcccacaattgcagaagtccggaatctttctaacatttttaacgtcgtctaatagcagtaaaatctcgtagcttatagacatataaagagtagagaaataactgtctagcactttttatgtctctataagtgaactatatggaaatctttccacttatatatacaatttcctgctcttcttactctcgtcttttaattttagtaaggtcgtggtacaatatataaatgtcatgaagatagcatagccgaagatcaatatcccgataactgagaatctgaacacctagttaattaaacgtggtattagagaagttttaatctaaaatcttgattcaagatgtcttttttgaacctctgttttaaagtcttttcagatgctcttttattattttttggatacctttacgtatggctttttgatggatttttaaatgcctacaaatatctgtttagaaaaccagctgtaaatcaattaacattaaatacatgtttcaagtgacctgtttccaagcagaaacgttcttcttcacaaactcctcccacgtagtaggcttactatcgagaaggctcaggctgggctcgaggggttctccgaggtagtagccaggctcctccacaaatagctggttctcaaggtactcatcagcgatagcagcaggaagggaggccttgtattgatcggaagagacttggacgaagacagccttcttgccagtcaccttggagaaggtgtccacgatctcctcgggggtgtagtacttcgcagcggccaatatctgcttgtccttcagctggccagcgtgctttatggcagctctcacgaagagacctaggggatatgtgagttaatgcgtataaaaaaaaaagaggggagctaggagaggtctcacctgtatcctgggccgcatcgaagagagggaattgagcctgctttcccaccgggtagaaaagctggtatgacccatcctcagcacgactgagcatctgggtgaagttgctcatgtagtaaccgggaaggacaaagctgcatccaacgcccgaagcacgaatatacttctcgatactggctttgctatcgaaatgaggcacatggctcaggcgacccttggtctcctccgtaacatggtggagagatgagaatatcaggtgagaaacaccaatagccttggagacatcggtcacattcttgccctgggagaactcaatgtcggggttcatagtctcccagtagttggtgacgaggaacacagtgtgggatcccttcaacgccgcagtgagagtgtcgactgagcccagatcggcctatttgaatgttagtctctctacctatgataattattcacaaagacaacaaggaagtgaaaagagtaaaacgaaataagaaatcccatcttaccgagacaacatcgacaccgcgcttggccaggtcctgtgccgatttcttggtggtgtcgcgggtgataccccggatcttgaattccttcgagagctgggtatcggcgagaatggcgtcgatgacggaaccaccctggtttccggtggcgccaaaaatagtgatcaacttagacatggtggataactgatggatttagcttggagaacagaggaatttgggcaataacacagtaatctattctcgttagaatattgtatctcagttgcgtctggtgttcttatttaccgtttccaaggctataagggatgttagaagatagtaaagtggtttgaagagaaggcttaccctaagacgatccggccaacgaacatctgcgccagactgaacgaactcgcctgaagaatacctcccactgccatgatcgtagtccccagcaggatagctttcttccggcccagatgctcaccaatagtgaatgcgacaagcgctccgaagaaacagccaatatcatatatcgccgtcaccgtggatagcatcgttgtcttcgtaggcccgaccagatcgtggacttcaagaaaatcctgtgtgatcacaacgccgcatgtattgaaatcagaggttaattcaagattgcatagtctccagagcactcactgaagactccttggtcgtaaccgaacaaggtcatatcggttgcgcatgccacctaagacaaaacaagtcaaattgattccgatcaaacactacagatacctctagtcataccgtaatccagaaggtcagccatccccctgttaacccgaagtagggctttttcttctgcgcgacggtagtcatatcgtaactaactataaagaatcaaaggaatggaatctccacaccgtgcctacgtagaagtgaaacttcatcctttatatactagtctcgaattaattatgtatgtcttggatgtatgcaagggatgtgtttacaaagagatccggggaatgatctcgggtccgccccgaagtccgggggaaaatgcggggagaacttccgctggaataaggccgttaacccaaaagggtatcccgtgggacctgatcgtctgggatttataccgcatctagtagattagattcgttcggattcaaggaaagattcttacgtcactgatcgtctggggggtatgtcatttcggcattggaggaatatcgtctgctataagtgccttttatggactaatgaggtacaatcctaggaaaagcacgtaatatgcagatcaagtcgactgaaagaggtatacatagatagtgtatagtggaaccactttttgtgtacgcagaccttatgtaggtctccgcctccgctcctaatccctgatgtccatggcacgtatttttgaacagatgatattgcatgcctcgtgagatggtataggggccatgagccagatgaaaaattgaagcaccaggaaacaccgtctgaaaacaacaccagaatcaacctgcaaagcatccgacggaatgcaaacttgaacgcaacaagcttctgaacaagaaggggcgtccgcaaaaattcaaaataaaccaaatccacgtataatacgctataataatcccaacccgacgtgtctagaacatggagccagtccatgcagctcggagacgcacgtgcggcacggcatccccatctccgacccgggtcctgccctatctataaacctcaatcacagagtcacgctctcaagatcacgcatgacaatacccatctgagcgcgcttggctgcctcagcgacaagactgaaatcctgcaggaagggcgctgtggcagttgggcccccgagaccgtgtatctgatgggggtaggcatcggatgtggacgccgaagtgggggctgcatatgcatgggtgttggctgcgggggcgatgggcaggttactcgagttggatgtgttgccgaatgcctgtgacaagggttgcatgggaggggcggaggtttgcggggaacaggcagattggagcgaggatgaagaaaacatctgcctggttgcattcgatgcgacttctagggtattttgattttgagactggcctgccatggtggactggccggttgaatggttgagtgttgaggtaggttgagtttcttgagggttgtagactgttcgcatagtcgagtccatgacgtgactaaaacggtccgatcttgcaagtgcaggaagaataggccgcactgaacgtggacttgggtatattgatagaacggggagagggtttgttgctatggacaaagatgcgatgggagattaagaatggaaaagggagcagagtggcaaggaaattgaagccgcttcgaggatgcaaattgcaggaagctaagacgaatttagatggcgggggcaatttccactaggcagacgatggacgaatggccgaatgatagagacagaagtgatggaagagaaagacttgctgtctaaaccttgcaagacagagatttacacagaatccctcaggggtgcatatgaccttgtgaaggccaactgcagtttttcctttaatcccgagatttgtccgaggtggggtattgtaccgtattgtgacggtatctccacgcttttctccacacaatattacgataccatcacgtgggaatatacacgtgacgtttaattggaacagggtaactactacagttctctgtagagttgtagagtatgttagaacatcagacaatccaaagaacaatgcacatacacatatgaaaaggcccgaatatcgaatcccgagcccgagagaccccgtaatcagcccactaaaccttggaatacagatagtgcctgaggcaacactccgtaccgaggtctacgataagaaattgataactgatactgatattttttcccctccaagcactaagccatatactaccatggccgacgactttgattcagggaacctattccaggacccggaagggtactatcccgaagaggagccgcccacattcgccgagcacaccatgctatcaggccagaaagtgcgcgtccgtctcgtgggcagccaccccctctatgtatgatatcaattgacacgaccagctgaggtgcctacttacagaccttgacagggaaatctgctatggaacgctggacgaaccagctcccattacattgaggagcacaccgaggatctcatccgaaacaaggatgtcctcgaaatcggtgccgcggccggcgttcccagcatcgtgagcgccattcagggcgcccgcaccgtggtattgaccgactacccggatccagatctagttcaaaacatgaagcacaacgcagagttggcggccagtgccattcccgcgagggaagacggaaagccccgcctccatgtcgatggctacaaatggggcagcgatgtgagcccgctgcgagcgtatctgcctcctgctgccgatggctctccgtcgttgtttgacgtcttgatcatggcggatgtggtatacagccaccgcgagcacccgaatctgatcaagactatgcagcagaccttgaagaaggacccgaaatctgttgctctggttatcttcaccccctaccagccctggctgttgcccaagactgagcaattcttcccgttggccgaggcgagcggtttcactgtcaccaagatctttgagaaggtgatggatacggtgctttttgagaaagaccctggcgtaagtcattttgaggattctcctttggattatgaccgtgtactgactcttcacaggatgaaaggctccgaaaaaccgtgttcggatatgagatccgatgggcgcaggatcaactggaggattcatccaaagctgtttgagtcgttggtttgatacttcggcctttttggaacgatgacatgattacatgacaaaagttcgatagatttgtatacattgggatagagatatgttctagaagatatttaccatctctaaatttgcgccaaaagcttcatgttcatggggtcatcgccgtaagtgagcaagccctcgagcttatgtaataatcaggtgattctcagtgagaaagccatctcgcggcctaattcggtgtatatgtagctttgcatcgtgtccgtactagagtgctcagaaatttgcaatttacaatagcctgccaataatattctgcatgataatgcaaatacaagttcttcaagggtggaaggtcgtggatatagatgcgggtcacatgccacaacccccgcaatgataaaaaaagttgtttgaacaaacgcacaagtcaacgatgccggtatgtcgacaaaccttatatattctacaatcaaatctaacatctacacactcagctcgttattttaacggggtacccgtgctccggtctcacctaccgcgccaatcaactcgcatctctgatcgagaaacaccaagatgaagtattcgcagcagccgaagcaggcgcgcaggtctccttgaagtcccgatacaaggtgcacgtggtcgcttcacacgattcctctcatccacggattgtctacgaccatgcccgcaccgagaaggaggcacgcggcgtcgcctacgcgcgaaccaaacgcgtgctcaagcgggacagcatcgtcatcctcgatggaatgaattatatcaaaggatggagataccagctgtggtgtgaggctaaagcggcgcaaacgacatgctgcgtggtacgcgatcggaagatactaaatgaatcgcgacacccaatggctgacaagtctgctccaggttcacgtcgggacacccgtcgaccagtgcgtcgccaacaatgacgcccgactacgccgagatgccagcaagcaagaaacaaaccccaatacatccgatgcgcagacctccgaatcccaagatacccccgcacccgactcaacatccaccgaggacaacgaggaagcctacccacccgaactcctcaacaacctcatcttccgctacgaggaaccaagcacccacagccgctgggataagccgctcttcacagtcccctgggcggacgccgaacccccggtttcagacatcttcgaagccctgaccggcgtcgtcctcccctcaaccgaagcacccaccgaaacccccaccgcaagcctaatcgacgccctcaaatccaccaccatctccgatgtcgccagcacagcaaccggcacacgagccggcggccgtagcgggatctccacccgcgcccgaatcatcccgcaccaagccactgtgcaagcagcggcaacggactcgaacgcaatgtacgcaatggagaagcggacatcggcggtcgtgactgtgatccgtaatttcacgcagacatacccgtcggcgcaggtagctcttgcgcagagcagtcgcagagatacaatcgccattgacgtgcccgagactactattcccatacttattccggctcatgttgccatggcgggaacaacggatgagctcgctgctgctggggggattctggcgttgccgcggctgcagaggctgcggaggcagtggattagcttgcatagatcgtatgtcggtcggggtcatggttcattggcggcggatcagattggagatgcgtttgtgcggtttctcaatgctgagttctcgggtgcggttacggaggctgcggaagaatagatgcttgtgcggtcttgttcattatgaaaagtcagttggtgtttatgagaaaacgaggttacgacttggatacccttcagatctacagctgtacgtggtttaaaaggattgcaaagtaaaaggtcatttgaaagaagatacaagaacgcaagactatctatcaacatgcataaatcagaatccaaccaattgttggacaatacatggctatatctctctttactgtcattcttcttccccttgagacactgtatcccgctttgctgtttcctccgcataagtttcgggtcttttgtgtcattggggatgattttatccatagatctggaattcaggccaagaagctcagaagcccttggtacgaatccagatccccatgtgaggagcagcctgcgatccggagcggatcaacaagctctcgagcgtggggtggagtaccacgcgtcctatccagttcctggccgtaatatccatatctggaatcgaatcgtccttgtccgatgatgggatcaaacgggacaatccttcggccgaagtccattgtgtactcgcgagcgatcgcaccgggttctccatgtaaaagtgcctagccagcaagcacagtctagccggagtaaaaaaggaaatcaagaaaaaaatcctccgtgaagtttgttcgtgtcgttcaaaagaaaaccgctgttctcctccaggacggagggcctacagctccttaacccttcaaggcaatccattgggcatgtgggaaacagcctggctggcctcaatctggcggtagttcaagcccaaagtgaacagttcctggaaaccggcattgaccttctcgtgcataatggtatccttaggggaaatggcactcagctcctcgagcagacgcgagcggcacttgaagaagttctgctcggcgttctggaggtgctggctgaggctagcggaagcttggctggccttgatggagctagcctgggagttgacggaccgagtgcgcttcatggtgggcgccggggtggcaccggtgactcttctcttgcggccagtgggttccttcttcttgatctgaccagcaccgggcgaggtctcgggcgagctgtggcgctcggaagtggcatagtcgtgcacgcgacgcatgtggtcgtaaaggttccatctccgtgggaatccatttcctggaacggcgcgttcacagccctcccacaggcagaggtgggggttatctccatggccatgtagtccgtgagcctcgcgctcgtggcggaacagacaggcgttggaagagaagcgcagctgggcatcgatgcaggcggggaccttgcagcggtatggcttcagatgggaatccaagtacttgctgttagttgatattggttagctgggttcattgcaccaaagatttcatcacgggaggacttgctggtaagcgcatttttgcgtggtgggtgggtggctgcagggtttctctccagtggcaaatgggcagtagtattttccatcgctgtgggtggacatggaataatactggtgctctcgcgggttgcgagcctcaacaccttccttggatcttgggcgggctggctctctcactgggagggtagggaagaaatcgggctcagtcttgatttgttgctgggaaacagatgacaacgccgaacgtcgggatggctttgagggtctgatggtcctacgatattgtggttaggtttccgatcacatttgtattctgggtgtacctctttctgacactcacctgtggggatctctgtcgttgatagaggagctggggaacaagggctccgcagggttgagtccatgggtcgttccaatgggcgatgtggtgaaatctccgaggagtgcatcatcgggggccatgaatgaagagtatcccgcgtgtgagcaagaaatatcattgctagcgtcggtcagtggtggggagaccggggcggtctggtaaagacctgacgcgtattccatggtggttcctgggtaatgggtatcatgcatcattggggtccactctgggcctgtgatatagtggccgtcctcggtactgtgagagctgtgcccgatggaaagagcatcatctggggtgccgtttccgacacagacatcattttcaacagaagagaaatccaggaaggagttataaagatcccgggtcatttcatggtccatgtcagggactgctgggaagtccatgcctgggtacataatatcatttggtccgaccgtgggggtcatcagctgctgtgatagagagaaagaaagcatgtgaacctcggatgagtctgattttgacatggcctggtcaagggagtcttggcggtttagtgtccagtctttcatgtcctgtggatttccatgggctgtacggatacttgagcacaacgaggagctgtcatggctcgaaatttcatcatcctggattgatctcgaggccatatttgagattcctgaaaccatggaggtatgcatggactgtgagatagagacacgatcagagtcgctggtgttccttggagacattgtgtgtgtggatgtgtgagggaaaaacactgtaaaccaggagttagtatctactactcctcatcgaatgaaataaaaagcaaaaaaacagaacaaaaatgaacaaaaaacaacagctccatggtccagaagcgacgggatacctagtgagagtcagtaaagagactaggccgcgtcacgatttagttatacgcaccgaagtcgtttgtatgggattgagatttccttggccgaccagggattatcgtaaggtcctggtcaatgtgtcgtgtctatgttcgggtccaggtctgttgtcaatccaagggagggctatgtggtgccagggcgagaaacattttcatggccggtgttactatttggttgaagcatcatcatccaggtgagtccaggtaagcaaaagaaaagtcgttcatttttggccaggtcagataggtacacaacggccaggttccatagagcaacggcctaagcagaattctaaagcggatgcttcgaaagaccataagtgtcagggagcaagcacattagcttgaaagattccttggttgattccttggggtcaaagtggttccattattgttgagagacggtggccatagtagtatcggatatccaggcaaagagtcatcaagtcattaagtggttcattccagtgttgtttccagaggcagtggggtccagggtatatcaaaatccgcactcaaactccggtcttagagcagaggcaatgtgaaaagcagaaacatccattggcagtagtccggtggtagtggaaatcaggcgatttgagagtgcaacattaaacacatctcaaagagattcactcagcaggtgctgaaggcaggtaggcaagtatcctgggcagtggttcctcaatggtcgccaaaattggcaaaaaaaaacaagtccgggtgtggtaggtctaaggtccttgggtcctgggcaataggttgtcgacatcctttggcaagcacggctgacaggtacaggtccagacaaagcagataaaaaaaaaaacaacgcataggagaaccaattgaaaagaaaaagtgacgggagctacctattgtgtttgtcgagaagtggcagactaaagagaagcctgggagataacaagaaaacaaatcctgtccgggaagtatgtggcagagagaaaatccttgtggcagtgattggatcaaaaaccagggagtcttaggttaagaaagaagttgtccttggtccagggactgagttgttgaagaggagtatatataagaatgatacacaaggtaatcaaggtagtcgaggtggtgatggtggtggttgtagaaaggggtactcagagttaaggaaggaagaagaagaagaaacagaatggaggaggggatcagcgggtttttagcacacaaaaaaatgaaagctcggacttgagagggtctgtgggccataaaacatggcgtgtgccagtctcgcatcatgcaggagacgagtgcgctgttggcaccgtcaaggccagtgctgtcgactggcggtgatggcatgtgcagatagggggggtggctcggttgactgagtggagggatatctactagcggtgagacgggctcggcgtcttagtgcttggcgagaagtatgattggtgacggccgaaggatgacggtgtaagacgaagtccgagttgagggatcggcaggttcgctcgcgtgttcgatgagatgtccaactcctgtttcacttcagggggatcgtatggaggagaggatcccacgtcagagggccacgggaagtatacctgcagcatgcttgtacagcggttgcgactcgaaatagtacaacatacgcacggagtacacggggtatacggagcagtgaagcaagaaataaatggtaaatgtaaattattccaatcaataaaactaagattactggacgacggcacggggcgagccagtctaccagacccacgttgggcagcaatgcagtcacttttctcctattttcgggtctttgttcagtcagccaagttcgaaagaagtatgagaaaaagatagacaaggttgacaggatcagaaaagtaaaaatggaatatgttttcgttcagcaatccgaagatctcaggtgaactatgctttaatattggttgttcatcacgaaaggcaaatgcccttgggaggcagtaaaagagtgcaaaatcaaaaaataatgataggcttacctgttagcgggatttgtcggaagaaggatgagttggcatgaaacaccaagtcatcacaggtcgtcgagggccgtgagggcagtctggactgtgattgacggagaaaagggaaaagaaaagaagaaaagttttttgtaggtggtcagatcacgtgatacgtgtacatttgtattgtttacactgtttgtctcgatttggagcaaacatccaccccatctgacaacggaggccttatccactctccacattgcattcctcggcatcatgaattggacaggcggccagctgcagcgtcatcacactcgctcaggcctgttgaccaaagctcagaagcagaatttcgctaggtcgagactccaaaagggcacggtcatttccccgccttcgccatttcgaaacttccctgatgaattcaagggctcgagcactagggaggatgagggggcagagacaaatgaaaatcagtcagtcaagaactgttggttgctttggctttgcttccgtcaatccgtgtgggcgtactcgtgctaacctgtgatcgtgctgattctagagttccggaagagtcggactcacatttgactggtcagacctcccatggtgatagtggccatggtgatagtggcttgaccggggtcaagcgccaactgctaaaagaacctgatgtggcagccgtgtctgctgcacgtccactcgaccttgcatttacatctgtcggggatgtcgagcgctttgggaagcgacgaaagctaaacgacaagaacagaaatcgacgggtagcagctaacaacaacgggtctgccttttttgaacggccgagatcccaacgaagaggcagaaatccatcctcggtgattgataccattgaagaagacatccagtttgagatagatggacggccagtggcgcaatccaacggcagctcgggggtggtcatgaacagcatgtcatcccagtcaatgctccttgaccatgaagaatctcctgttacggaacaggacatgggcaaagagaatctgacagctacttggattaccaatctctatccccgttcgcaattccctcagcgcggggctatgccgagcaggctataacgtcgatgctcgttttcatgcaagtcagatgaatgacacatgttctcggatatatcagataggtgttggggaagcacatgcttctcactccttgtgaaccctgtcttcccgggggcggcctgctagtcaaatcgtaggccaacagtatcatggaagtgccgttggattttccgaggtcagcaatatcgcctgacctagaaggaaaacgattacatagtcccataccaaccaaccaaccaaccaacaaatgaatgaatagaccaataagatccttgacccaaccaaatccactgcctaggccattctacatgcacgccgtaaatgcccatgctcctgtacatcgtaagttgcaccggttttccgttcctataggtctaaattgccgtattcggtcgtcacatgattggtagctgcctcccgaagcaacgtcatttccgtctccacaaccatctccaattatcaacggcgcgaagataccaagattaccagttctatcgttcaataatgcgttctatcacactgttggccgcactggccaccaacgcactctcaatcgcgctcccgtggcaatccgccccagatacaaccagcggaacccaactcccgctcgtgatctggcacggtctaggcgatgacttcgaacgcgaagggctggccgaagttgccaatctagccgaagccaccaaccccggcacctacgtgcacctcatccgcctagccaacgacggcagcggcgaccgctccgcaacctttttcggcaacgtaacagagcaaatcgcgctagtctgcgagcagctcgccacagacccaatcctcagcacagcgcccgccgtcaacgcactaggcttctcacagggcggccaattcctccgcgggtacatcgagcggtgcaacacgccgcccgtgcacaacctcgtcacattcggcagccagcacaacggcatctcggcgttcgagtcgtgcgcctacgacaattggttctgcaagggcgcggagcagctcctgcggtcgggacggtggacgagctttgcgcagtcgcgcgtcgtgccggcgcagtacttccgcgatccggaagacctggattcgtacctcgagcacagcaattttctggcggatatcaacaacgagcgggcggtcaagaacgagacgtataagaagaatctggcggcgctgaatcggtttgccatgtttatgtttgaggatgatacggttgctgttccgaaggagagtgctttgttctcggaggttaatgctactactggtgaggtgacggctctgcgcgagaggccgatctataaggaggattgggtcgggctgaagcagctggatgagcaggggaagctggacttcaatactgcccctggagagcatatggatctgtctgaaaagacgctgcgcaaggctttcactcagtactttggtccgctggagaagtcgcgtccttcgccgggtctagttgtgcagcccgtgttctgatcattctcttttgggcgtttgcttttattgtacgatatcccaactgcgtgtgcttcatattttggatactagcctcaaattcgaagtccaatccaacgccgtatggctggttggttacatttatagaactaccatttcttgccatgttcgttctagcaccgtctattttatgtctattgacaatgtagctagttacacaacgctgcgactactcatcgcaagctaacaaaggaaaagaagatgtgcgtgccgacagacaagaaacaagagtccaagcgttcaaaaaaaaatatgcaaatgaaaaagaaaaagacaatgatgggcaccgagccgaagtaaaataaccgacaaaacaaaaaggacatgcgtatcgcaaaccgctgtaaaaccgcgaccggcaaatcaaaacatgaaaaacaagggagggcgaggcaggcgggtgagaaaaaaagaccctaacagaaagaaaattatatagacatatgaagggccatggaatggaaacagctgtggagatgcccgcagaatgatgaggtatgaatcaaacaaagaaaatcaataaggtggccgaccaaggcctccactgcgtcgtgtgctgctagatctgctcggcagagccttggaggcagatatggcagttgccgggcgggatccattcgtcagcttattctcgtttggcgagaggaacccatccaagagcttccgtagttgatcttggtggttgccatttaggtcattggtctcatagtcggttaagagttcgggaatcccagatgtggcaaggctgtggttggaccggctcttgttgcggtttagaggcttgtagtttaaggcattggcatcagccctgtctctcgctggaggtcccgatggggctggtgcggtgaatggacgatcatatgaggccagcgagcgctgtgagtcattcgggaagccacctgggatcgacaagccagttgggaccggtggcacgggagggatgtcttcggctttatcgcctgataggaaaaatgccgcaggcgtggcgcggggtgtctccagtccatcgtcatcgggtgttcgttggctctctggtcggattgaggtagcatctccatctatctcggaaacagagaagttgccgctcatcatgctttcgctcccggaagaaacggaactgtcattcgatgcgtcaagtcgtccacgtagcggactgaggcgtcgatcatgggagtcgctagtaaccgaaagcacgcgtcgaagctcattgacgcgaacaggcgagctcctgcttgaactgttggatgacgagcctgagatctctggaatgctcatgcggcggttatattgggagccggcgggtgagccattcgtagccatgttggtttggttgtagcggggatttgtagtagctcgagagccagataccgatggtgttccagtgctttccttatcgacagctgccaaacatgcctcgcgagaccacggagacaacatctgttccttcacgacggacgggaggtggctctcaacctgggatttgactgttgctgtggagccaagtaccgggaacgtgaatcctcgtgctggggaagaagccgaggaggggctttctggaggagaagataccaatttgcaataagactcctcaatcatatagacaagtccttcgacgttgcagaatggtgtcaataggggtggggaggtggagtcattgtcagacctcttctcgctgtcaaaaacaatggcatgaagatcgactgggggtaggcggattttagaaagccagtatcccttggcctgtcgctgctgaatctcattacttatctcctggcccacgggggaggactggatgtcgaaatgctgagacagcgcaagaaggtatccgtgtaccaagctgccaatgttaacgcgagctgcgaaggaactcaaatccatagatgtaaacaagtcgtcttgcaatttaaagaccatagggacaccgaattgagcggcattcaccccgaggttctcgacaagatttgcaagaagtaggtgcagcaggaggatctcggcttcctcggtcgctgcctcgattgcagcatcgtagatagccaggtgcagaaggcggaggaagttcgactgtgccaccagcgccactttgtccctctgggtcgcagggaccgacgaacctcgtcgagtcggcctatccatctgctcggtgtctttcttgggagtcttgatgtacttgggtgaatctaatcgcaccttgaggtcgttcccattggtctcaatctgcagccatgataagaatgcatcggaataggcatagcgaacatcacgatccacatcacgaagaagtacttgggttccttcccacacatggatcccgactgaatgtctagattctacaccagacatggttgctagcgtttttgaattggccacaaccaagatggccttgacggctcggagagcagtcagtttagcggcagcatgcgagaaggtttctgtgcttgctttgtctccatttgtctctggttcgtcacttgtcgcctcatgtgtcactccggattcctgaacggttgccaatgtggatggcgaggaactatcatggtggagatgaggcttaaagcgcctgagaatggcccgcatcatgtcttcgacttggtctccgtagtatatgtgtgttgcaagatctccaatagactgttccagtagcgtaagaagatcctgtcgttggggagagatttgaaccacgatttcagcttgtcgatttttcttctctccgtctgcagagccagtacgctctgacggtgacagtatctcagaagcgtagtgcatgagtccatagaggacatccatgacactgagtccaatcatgttcacagacgatttgagaagcgaatccaccacagagagaatggtgaatgatgactgtaatgcatcctcctttggggttgtatcatggagaatctccatagctgtgatcaagatgataaaacgaacttgcaccgggcaccagttcgcaatgaggtcgatcagagatgttgcccagttgccacatttgccctcggtaatctcgccgcgcttttcgctctgcgggaagccctttctcgaaatgaactgtagaatgaccgttactacaatacggatctggccccggttactccccgaggcgatagtctgctcaagacagcgcagggccaagacccgtgcatccatttccgcctttcgatccgcctcagcggccgactgcgctgccagctcggggtcaccttctgccacgtccactgtgtgcaccgtgttgacactcattcggcggggtttgggcggctcgcgttcatttgcctcggtttcggatagcttttctttcagtgttatgagaagattctcatcttcagaatagaggttcttcagtataaccggcaaacagagcttcagcaatgttcctccatcggcggtcaaggtctctgagctgaccaccgctctaatagcgcgcaatcccgcatttctccaccggatagccacctgcgggctgaaatctgtgttcgcatttgatgtaaatcccgggtcggcaaggccggtgtaagttcgcacaacttctcggtattgatgtgcaaggctctggtcagccgcgatggccgcaatgtcctgatatcggcagaacatttcgaaggtcacaatcgattcctccaccatatttatatcgttggatcgcagaatggtatcgattactgtcatgacggatcgggcgtagataggaaggtcgcgaggaactttttcgatgattgcagctaggatatgcagcgccacctgaacatttctgtaacgaaatcggtcagtcattcgtcttgtccgagtccgattactcgggcgatcagagtctgcgctcaccctattctgcgtctccagacatctcgggcaaccctcttctccagaaaaccgcagaccttggtcaacttgctgcggcgcgtgctcgtatagtatagcaggtatgagagttcgctggagttcggccgaacctccgacactcccttctggtatttaggataacatttcaaggtcaagacctggtgctttggccggcaagactggcgaacagattccattggaaacgcagtgtcacatgcagttccaggcgggggttccacgaaagaggggaacttggtagtattcgaggtgaaagatgaattagagacaagcgagagtgcctgagagagtattagttaaggtccatgggagagacgttggaatgttcgaaccggcgcaacgtacggagtatgtagatgacaacggggttgatgaggtacttgtgcacggaatagttcagggccgattaccagggggcggggctctgtcgtaacgagtctgaaaaggcacagaaatcttcaaaatgtactgatttgaaaggaatggaagttggaaaggggagatgatagaagaaaaaattaaaacaagattgggctccgggatcatcgggcgtattctatattctacctgttcgtccactcctgtctagtcttacgtatacatagaaggtcctagggtttatctttttcatattgttttcgtgtttcggaagaattgcgcatcaagataatattgttaattccaattgctatccccttcattattaggagagtgtggcgataaccccaaaatgacatagcgtcttcagctcggagatatattgtcggtcatctccaacgccgcttagtcttttcccccgcaattctctgccactgtcgtcagagcaaatggggcacttgaaaaatcggagttcactgggagttcgattgataactccgaaacctcgggggcctgagaatcctcggtcgcacagcacgttcaccaaactcccatgctcaactccgccaaaggggggctcggtggaaatgaaatcaccagagtttgaatttcttgttcgacttaaaaatgtcagggcgcggtgtgttcgtatgacatctcggtcgcagcgatcgtaggatcggaattcaaacgcatcatgtcttcccattttggacatcttcctgcttttcatctgccgtgtcggtttcggcctgggctggttcagggacactgacccctgccagaccttcaatgacctggggtagaataatgtcacggcggaagttctcctcctggagcagtcgaagcgctcgcagtgtgggaccagggtgggtgaggaactgagagtactccggtgtcttccagtaggagtagaggtaggctaggtaggctgcaaatgcctgcgcgtctggcgagggggagtcatcgtcatcgtcggcacgagcgatacccaggagattgggataagtgactgccaagtgtgacaaatagtaagggttggcgagggacgagacaaattcaagttcgagagtaaaacgcgggttggtcaggtttggtcgatcctccatggtgaatctgatagagaacctcggaggattgaaatggcagaagctggagagcttcaaagtgagggtgttacggaaaacgatagcgtccattgaagtaaaaagtatacaaacatcgaagtactactcggtacatttccaactttagctctcatagaattcctatatcaactgcactatttcctcgtctgctcttggtccatatcctcaaaccatatactcttcttcttcccccctcctcaatccccttcgagctcattccaacttctccaaaagcccagccttctccaacgctggcctagcacactcctgagtccagcgagagaccctcaaacgcctcatcctagcttgggcagagcctgacaaagccaaggaagttgcaggtgtcacatactgctggttctcctcgattacccgcagcgcctcatcccaactaccggggtagttcttggtaagggtagtgcctattagcatcaggctttctcctatttccgtgacttcatgcgccctgacgctcacacggtcgtggtataagtgggcgccggcatctttagaggcaatgaagtgaatgtggccgacctcttcgttggtcttgacaaagatggccgagtcgccttctgggggagaggaggcgaagttgtatttgacaatgtagactttgtgtctttggggctccgccaaagtgacgttgaccatggtgtcggtgatactcttcgtggtattgttcatagtagaaaaagttgcttcgagggtttgtctttgcagaaagatatagagagctcgaggagtagacttggggatgatatggaggtagatttacacggcgaacgctgactcttaaatactctttgtctgttttattcttatttctatttctgtttctcttttccaaagaaatcacaaaggcgcctctccattgtttgaagtcagtttcagttccccaagcctatactatggctttaatattactatatctatagaagccaacctgtaagcctataaataccaatagattcaataacaaggactatatagatcacggaacaacagaacaacagaacaacagaacgccaggaccaatggaaccaacagaaccaacagaccagtttcaccagtccacccaaccaaaccaggccattatatcaatggcgtgaagaggcacatcaagatatatttattctcaacaaagtcaaagcctcatggcaaagcaaatcctccgccttctcacgagacatagccaccatttgtttcccgctcagtcgctcagcaggcaagttgcacagcagagagtcccagctcttaggatatcttcgaagacgtgtggtgcccgtgaacaccaactcagtacccttgaatttcgggtgttgggtcgagtatgtcactcgttcacgattgtagcaatacccccagacggcatcgtcggcgaggtagtagtggtcgccagtagaagatccctcctcactaacgaagagggctgagcgggtcgggtgcccggaaggagtgcatagggtgtatacaatgtatacgttgaggtacctcgatgaagattgacccatggtggtatatgtgtgcgattttggaaggatagagagttcaatgatggagagatttggagatgatagagacaggtttatatggcaaatgatacttcttaaatatcttcggaatcatcattactctaaactgatatatatcttggatatacaaactcgaagttacattatcatcggtttctatcgttagcgatccaagtggtcatgaggccttgcgttgaaacgaggccccgtttgagatgatatctatagagaacaatgtattgtcttctaataggcaaaagctatatctcacgaaaaatatgcacggcgcttagcttgaaggtcagtgcgtccaaggaaactccagaactgaatattcgttgccatccaacatacggaatacggagtataaaattccagtaaactctagccagctaaaacatttgctgtgtcactgtacttgtaaaatctaacgaaggcgtggcagagtcattaatgacatgttcagtctaatacttctacagatagagatcagggatgaaaccatgttggaaccaacgagttcaattatcatatccttttcaaactgacatggaaaacagcaatcggtaaaaaaatacatgtctctgaaagcaagactgaagctgagatacaagaaagaaaaaaaccttggaaaaaactccgatcatagccatggtcttatcttaagatcagggcattgtgtttcatggcggtctagaatcagaagcacttggaagcactctcttccgaaagatacgaacgccatgttaggcgccgtgcgttcatcggtgcttgatgctgggtattaacgtgtggaaccatccctccccattgaggagttggatggtgagatagtgagggaatcatggatttgacacatcccggaggtgcacccgagtgagaaaggcccgcttgctacatcgtatatttccgggacaggctcaatgtgtgactgctaggtgacctagtcgctagtccgtctttccggcttgggtttgcgcagactcttcatccggttcaagaacccaccaccaccaccagcagtgtttagcctcgactcttcgtaaggtcgctcgctgatgatcttgtgctccatttgcttaggactgctggacgatcgaactcggccgccctcgaggcgagcttcgatactcgatccctttttgtcccactcttcctcatattcgtcttcttggaagtaggggtttctttcataaccccgggaggttccagaatggctggagctcacctgtggcgcaggggggtagttgtcgtttggataagcaatgcgaccaggagcacctcgtccacgtagtcgctgagccaaactcttcttccgtgcaaggccaccattcggtcccataccgttttcattctcagtctgatggcgtgaaatggcagaccgactagccggagctccatcgaggaaggtgctggttcccagtcccatactctgcggcccatgaatcgggtctactcgggcagtgggatccatgacagccgtctcagcgttgcggctcgcagcggtcgagaagtcggtgtgtccctcctccatcctgccatggaaaaggtcaagatcgatgttagagttgttgggccctgcgccgcccagagccatgttgctggaacccttggggaaagcttgcattggcgcggtacgcacgccgcggcgattgcgatgagggttgcaggcatcaaacggaccatcgtggtggaacactattattgcagttagcatgagccgtatactgaaaaaaccgtgatacttacttccggtaccgtaaatactcgtcacatccaacttatcaatgatatcaagtcgtcgatccttgcggcccgagcgcgatttgccatctttgctgcgactctcacgctcgcgacgccgttcacgtcggcgcttgtcgtcgtcgtcatcaaggtccaacagcgaacctcgatccattaccgaagactccgagttccgccgagcacgacggggcgccttgtccttggaggtttgggacaaagcaggggggtcggcgaatatgtcgagcagatctttctgttttgacaccgccggtcgtcctgctggacgctccgggcgctcccttgagggtttggtgcgattcgagggagtgcgttgggtggcgtcagacgccgcaggccgaggaagatttatctggggggcaggcttgagggagagggattcctattaagaggttagaccagatttgagtatgtaggttcaagattccgaaacatacaaagagctcccgagtgttggacgacatatcattcttctcaattggagagaacatattggcactagtcgacacgccaggggtcggctgcagaggtataccctcagcgtcgtctaagaatgggtttgtagagcgtgggcgttccggacggttgatcgatgaaatggatccaggcgaaagagcgcggttccggaaggggttattggagccaaaactggccgctgttggagaatcttggtattctgttggtcgcagagacgttttgaatcagtcacaggtctgaaaaagatagaagaccagaaagtcaagggaaggtgtcatttatggatcaggggaggggggttcaaactacccccagcggtaacgtctgatatcctatgatttaggggaggtcaagcttctggttacgtaccctgcggggccagcgacacgccaggcgcatatccaaacgctggagtggcattcattgtgaaggatatttcgcctctgaaacaaggtgtgggtggagaggccgtttgcgtgcaatgagatgccgcgttaggtgtcgcacgaatgcggaagaaagtggcaggaggtagtgctgaaacagtgataatcaggggtaagatagtatggactaccacaggtcaagttcaacattcaataagcgagaaggtataacagaatcaaagtgaaagaaagaaaaagaagtctaagggagaaaggagggggggcaaggggattagggaacacgggagaggcgagcatacgtaaattgcccagtgatcgtctccttggggaaatcatcctctttcacttggccctgtcgatctttctatttctttctttacattatatgtgttcatgtttttatgctatgccgttcgggcttgtgttaactttttctcgctctgccgaatccccagactggcgttatagccgtagaggctaataccaaatcatcgccaaggttccactttgacatgttgtgacagttcaggaactgactgctatgtactctgtacattgacttcgactggacatctggggacatcccagctaatcaggcacgtactttgtacattgtacataaagggatggagattcctcggctaccaaaaatagcccaccccggggaatgacgttgccattccaccttgatatcatcttctgttcctggaatgtgtatgcaacatgatatcttctgttactttccgcatctccagatctcgtgcagtctagaaagatccaaagtgatgagctcatctgccgagggagaaggacgcaacttcacttgcagtccccgtggataccactaaaaaggttgggatatcagttatggccaatgagcggtggctgaatatgaccgattcgaatgctagttcgctgtatctgcatataaaaccttgcatttcgaatataatgccagcctctccagacagtttagccgacatctatctagtatgcggagaagtattcgggactcggtactccatagatatcgaacattcttcggcttggaatgcgatctaagatgaggtcataacttgaattaagatatcattggacttgcatacgcagacgaattaggtagaaactacctgttttgttcgggttgaatagtgaatcggtcaaccctagccgccttaatgcgatatctcaaggtggatgtggctacgtcagatctgaacctacctgtgttatcggaataccatgttggatttactgctatgtgtcatagcagccctaggattttcgtatgcgctacggtccattcatcccaataaagtagagtagttttgggcgtacgcagcctgctaccacctcaacatacaaattcgaaatatcattcattgattttgtattcattaccgtgtcatggcccaattcgaggacgggtcccctttcataaacgccacacataagatgcaaacaagatggtataaaacacaaaagaaaccattcaacggggaagccccaacccgccttctagaaggccgttcactgggcgatggattgagcccgcggcaggtgagggttggagacagggatgcccgcacggcgcttggactggggctttggtctggagagtgtatatctgaaagtagaaattagtacaagattccactagattcaaggatggagagaaacatacttggcaaatgcacgagagagtgccttcttgcagctgaccttttgactgccgatgaacgaatccacagtaacagcgatggcacggtcaatatctagcgaggagcagtactctgacagacgcatcttgcagaaagattctgcgatacgcatgatcgcttcaagatgacgaacctagaagattggagtaagaaaattgtcactgtatagacggtagggagatgacttactgtaatggggtacgctccggtggcaagggactcgcggcgcatgtctgcgaagagacgggcaaccttgtcctgatcgatctgataaagcttggggtggcaacgctctcgggcatacataatatacttccgcaggagctcctgcgggatctcgccctctttctcctcttcgtctctttgcttctctgctgcgcgtttggcgatctcctcctgtgatggaggcagtctctgaccatctcggttgatgcggtaaccctcgttgtcaataagattgccgtcggtatcaactaactcgcccttttcgttccggaggggacgagcggggttggaccggtggtgtgattcaatcacgaagttggccaagcgctcatcctcggcagggtcaaccaaatcacgcaccacacagagaatatcgaaacgagacaagatagggtccgtcaagtcgacattctcggagaatgggatagagctgttgtaccgaccacccttggggttagccgcggacacgacagcacagcgagcctgcaatgttgtcacaataccggccttggagatagaaatggtttgctgttccatggcttcgtgaatagatgtccgatcctggtcgttcattttgtcaaactcatcgataagacaagtaccccgatcagccaacacaagcgcaccaccttccaacgtccattcgctcgtgagaggatcgcggcgaacactggccgtgagaccaacagcactagcaccctgaccagtggcaaacacagcacggtgggcggtcttctcaacaaacttgagcacttgagacttggcggtaccaggatcacccagaagaagaacgttgatatcaccacgaatgtgcatcttgccctgggcctctttactaacaccaccaaagagtgaaagtgcaacagcagtcttgacatcctggtggccgtaaatactgggtgccatagagcgaataatcttgtccacaatatcggggtcacgggagagggctcggattgcgcgctcatcctcttctgtcagattgaaaccagccagctgatcgtgtgccttgaccacatggttggcctcaattacggtggcgaaaaccgggaagccgtttttgttgttcagttgggcatcgtagctgttacggtagacgccggtaatctcaatctcatcaccgggtttagcgctatcgattagatcggcaagcaaaacgacctcacgctgccgcggcagacgacctgcgggaaccgagccgggcgactcctgcaaggtcaacttctggtagttgcggtagactgtcttttcagaattgacagtgaagggaccacgcgactggcagttctgacagaacgagatcttcacctccgcactagcttcctgctggaacggacccaaggtgataccgcacttcttgcagaggaacatgacgtacttcaattgcgggaagacaccagttctacgggtaacaacaccactgacacggatcagacagttgagatgcgactggcgcagctggcgtagggtgtaaatgatcggcacatcagtgatgcggacgtggatttcgttgtgaatatcgtgatattgtgggtagtggaatagcgtaacgtcgagcgcaacctgatcaaataccttcaagacttcggtgggttcgttggcgaggaagtatgacaaagctgccttggtctcgctgaggtgggcgtacgacacttcgagtgaagcggagttcacctcacccagtgtcttgattcgattaccgtaaacagactggccagcggcgtcgatgaactctgtcaggaaggccttgaattcacgatagatggagcgaagaacctggggctgtgtcacccagtctgtaatgttggctgccttcacatctgccagttcctccaatgacagctcttccatgccctcatcagccatgtcaatatcttcacgatcctcatcataatggtgtctgcgtcgccggggttggcgcgacagatccagttccatatcgtcctcatcttgtaaaaaggcggcaggcatgcggcgccgacgtgctagttctcggtctctctggtttaggcgggcatctagctgccgacgagttgcggcatcgatttcatcatggtcttcatcatcgtcgatgtatccgtcgttttcatagcgatcttgcgctgcatctcgataatcccgctcgaagttgtcaccgaacagatcaatgccgtcctcgtcttcagccaattcgtcaatgtcatcaatatctggcactagacctctatcctcatcctcatcttcatctcccatgtcaaaggggatcggaggaggggatgagcccaaagcagtggctgcacatgaacatcgtcagtctcaatttgacgcagcccggacaaagaagcaaacatacgactggaaggaggcaatggcgccggggaggacatgtcatcctctctgtctctcttacgagtgttggccccccggccacggtttgcggccgaatcgctggctcggagcggactgtagtgcattagcttttgagcgcagaaaattcaggaggcacactcactccattgtgtgggtatttcagctggcaaaattcaaagaaaaaagatgaacggcaggaaattatgagtatggataagtatatgtatgtttcagaggttttttactcgagtgtgtgatagcgtggttgatagaatgaagggagggagaaggggcggcaaagtcgagttgtgcagagagtcgcgtccaacacgcgacgcgtttcaattaagccccgattaggaaggtgggccttccacgttccctatctttacacaacgggctcctggtttattttctatggcacaatttacagcgctgtaactaataagaacaaaaaaaagaaagaaagaaaccacattagactaaagcaaaaattggaacttgcaaaaagtcaatgaccgacgcagggatcgaacctgcgaccttctgtgaactccaacatatgaaatgtaagacagacgccttaaccacttggccagtcggtcgttggagtgaacattctgtcgcaagtgtgattgatttcatgactagttcctttcaatttcaggccgcctgcccattgagcattcaaccactttccaagtttatagcatgctcaccgctcaacaccggtttgccctttatccactttatacatcgatgtatacaaagatccatcccttccacatcaagttcttgatcaaaacatggatccattaccccaggacaaaacaccgtcgcgacaaatccgtgcggatatcaccgaaatggctgcgaaggctctagtcgataaaaatatccctcttgtagagtggggatcacagatacagtacagatgtggataccctttgatccttagagtaagagatgaaatatcctatccagcaatttagtcgtggggctctactgacttcctaatcctagcttgttgaatgggcggtgcccgatgcgctgctatcgctcgcatcccagaccctatcagaccggggcattccttgtattcccccatccgcagaggctactgcgatatatggacaatgggaacgagcaggctttgttcacagtctagatccagttcgttcgcaccgaatatttctgtacccattgtcgcttctcgacctcactctccaagacaccgtagaagttacatctacctttgaccatacgctgagggtcttgacacctaagcctcgaatgtacatgatatcactaatacgccatcttctcaaccaccctattggtgacagcagcagatatcatgtggaaagtgatcttgttggttttatatcctcttacatatttcatgacccacctctgaatactaagaacgatgaagtcgacgatgagagcgaagaagacttccagaaacgggtggaagaagcagttcggaatatcaaaaccagggattggggctcaacggaggagaaatatttgaccattgctgaacgtgtcgtccgcgactgtcggtctatttcacagctctctagttgcgaataagtgcaaagtcctgcgcctccatcgtgatctcaagcagggcacgaacagtagtatgtagttcatacaacttccgaacccatgaaagcaaatcgtcccttgatttctccgggtagttcgtgaaataaatgcgaagattctttcgagcaagccagttcaagatcgccgtaatatcctcaaagtcaccgcgagcctttctgttactttggggacgggtggattcagcaataaacgcccatctcttgatctttgtaagcacgagaacggaggggtgcacaatagggactataatctgatggttagtaagagttcgaaatctagtataaagtgcaaaggcaaaaggacactaactcgggacatcgccaacgcgtcctggtaagtcgctggcggagacatggtaaagaggaacggaacttgcatcgggtagcctcgaaggtcgatttctgccgccacgaagaatctcaacccgaatcgtaccctgatcgcgcgtaaaaaccaggttattgctctgggagagttggaacccgggcacctggagcagcaggtttcggacatcggctgggtctgcgtcaacgaggatatcaacgtcctaggtagttcaaattagcttgagtgatcgtgcaagtgttgagaagacactgaaagggcgtacatctgtcatcctcattccaccaacaagggacaccgcgtatccaccgataaagccatggcgacagttgccacgggtgagagcagccgtaatctccttggctgttgtatcgagatggtcgaaagtgctatgtatgaactgctcatgtgtttgttccatgatgaagtggtatgtctttctaagtgattggtgctagcgagagatgaacgaagaacaacttgaaataaggttatagagggaaggacctaccacgggaacggcctcaagtacatacctacatgtactagtagtgttcgaattggtgtttgtctttttcttttaatagtcctttttctgttttcatgtctttcttgatctcatttctgaatgtcttccctctttctagtgttatataaagctcatagttttgctcggagatgtggcccggatattatgacccgtgctcccccaagagccaatactcccacgagcaaggctgatcctgcccatatttgcccagccaaatagccacctcccgtgcgcgcgatcaacgctcccgccacggatggcccggtcaagggtccgaagcttatcatagagagcgacatgccgacccgagtgccgatcttgtccaggtctttggtcaatgaaggaatagtgccagcgaacaagcccatagcggccgccgatgccagtccataaaacacagcaaagatatataactcggccacagtatgaacggcggcccagcagaacatcagaatgccgcacagcgctacccaaggaatcagtaggttgagcggcccgatataacgatcggccagatagccacaaggggcgcgaatgggtatcccaagggcgttggtgacgataattaaattcactccggcttcttgggacaatctgagcttttcagtcgcatagacttgcacctggaaaaccgtcagcccaattaattatagatcttggatttggcagcgtacgtagaagaaggcaaaataaagggtccagtatagaaggaatacccccaaggtaaaaagcatgtaggccggttccttgaaagcgctccattcaatcagtggtcccgctttgcgtggtggtagtcgaggacgcaaaagtgctaaggtgattatgaccatgatgagcacgacaaatcccatacacctgacagcccatggaaaccctgattatgtatttatctgattagctatgaaaaccagtgcggctgaaatagacttaccgatcttcggggtaagatactggatcattgcagggaaaatcatgccccccgtacttgttcccgtggcagcagctgtgacggcaaagacccgatagcggacaaagtatgtcgagatcaatgtcacagtaggcagccacatgagaccctggccgatgccaatacaaagtccctgagccagaaagatctgccagtaatccgtggccagactcgtcataaaggtcccgataactaacagcagcccacctagggctaccaccggccttgccaatccagcatctgttgcgcggccggagagcgttgagataaacaaaagacagaagacttggaatccaccgatccacgaaatatcggagggggcttgtggtagcgtagactcataataattttggaacaccccgaagctggaggcgtagccccaagtcagggctacgaccaagtgtcctgcaacgacctgagcccaggcatgaaatccgccatctggaggtgggggcaatggtgcatttgacgtatctctcactggcgcatttggtgtttgggtattgttccctttctcttccccgctcgcaattgctccggaagactcgtaggctgtcatatttcgctcttgggagaaaaaaagcaccctcaagaagagcagattaaaaatgatatagatgcatggggggaaaaaagggtggggatctcagagcacaaaaactggatggattagaaatccatggatgatccctgtctttgtatgtcaccatcagatagcgggtttagaaaatacacttttgtctttggatagggcaaataaatagggcaaataaagaaactatagtcttagtttcctacaggaatgctccttgaattggggtagagctatgtgtcaaggtgagtaatagcattataaaccaagtatggagtaaaagattgggagcgggaacatgcaaagggctaaccttggaatatcctgaaaattccaatacacatggagttacggagtcctctgtaatgtgtataggattgaagtcaagatctgcatactagtatactagatttccctccaaacggtctggtagccggtctagtatatgtctcaggtatagacccaagcattcctgggaccgggccttcctcaagatgtcatgaaggcccatgttcattcaagacattctgtacaaaggttctcgtcttgtaagtgacttatggcttgctccatggctgaccaatcaaggtcaaagtgagatttgcgggatacccagggcgggatatcccgcctgttccaccgcccctccgctccacccatctctgtgcctatccaatctaacaagcaagcacaattattgcaaagctattgagataaatgcaaatgatttttatcctaaaatgtttctaacgtagctttttgcctggtgggcaggcatatgatcttgcgacaaatcagtccttccagttgaggtgcaagctttgtgaaaaatttcagtcaagccgcctcattgagatcaatacataaatgtagatcctctaggcctttcaatgtagagagtagagagtcaaattgttcttcggagagggcaattctggggccgatattaccacagaaattggaatagtaggtatatagctttcggggtctgcagcttgagccatatagtgtaagaaaaagcttcgataattctaaggagtttagtttccttatctagctacactgaccagtatgggtaaacgctcataggctataaatatcgaacaaaaaatcaatccggcttattatctatcgccttcctaggaatagaactgtctactactatagattaagcaaaaattccgttctataatctgcgagtcctaatgtttaggggttctgaaatcgatcttatattcccgaagttgaatactaaacgcttctgattctagtagattggaattgtctgtaggtatagctttatagatagtataccgactttccagcttattgccattaacttgtcggcagcttttcgatagtatatatactatactaagggacttttcagtaccattgaatagagttagtattatctatagctcttagatatacttacagagaccatttgacttggatagttcttctagtttatagagaatttcgcttatcacaatgaaacggatttttcggcaaaggtatccgcgaaattctccagtgagttcttgtacaaagtacggcatgataatctcagagcgaccaattgctggaaatccaactggttatatatctttgagattaattccacgggcagagctgcaatggatattttggctgcgtgtgtgacgtttcaagattgagaacaatgataataagaggctcgatttgttatccgcagaaatgagtgttaatcagccttactctctagggctccgggctctcttctccctttgacgagaaagcgaaagcaaggtaagatttctgcgccgagagacaatgagaagagtagtgcaacttgcttcttctttctctcctaatcttagttattttgaatagaatacactctgcttccttagcaaatcacaggtatctgctgtcttagctactatcatatgcagtttggtacaaaagcggtatacaaattctcagctaaaaccggcacctgcatgtctatctagcgtgcttgttccacttatgtagagaaaacataagcccatgggcggtgtagggcggtaacgcctgcatttgttggaaaatgccggcagaaactttaagttacgtcgcgacccatcacgtcgcgtcgtgatccaacatatcgcctcgacacttaggacttaggcctttcgttatttgtcaatttctacgataaggacgctgatacaattcccaaacatggacgccccgcactcggttgttgctcaactcaccgaagatgctcgtagtgagagcatgggctcccagaattcccagaccgcgaaagagtatgtctccccaatactctcccccacactaggaaagtgatatactaattgattttaggtttattgaatcccagctccaactagaggcagatgcgcgcgaggctcttccttatgtcagtgtcccaagaaagcaggtggcgcggcgtttgacttatctcaacagctgacttattgactttaggcctttgactcttgcacatatgaccttggaccattgcgacaggtactctttgcatgtctcacctgcaatcctcctcctgtcagccccaacgaaccctacactgccgctgccgtctgttactcgtgctcgatcgcttgtcacggcgagcataccctagtcgagctcttcaacaagcgcaacttcgtctgcgactgtggaaccacccgtttaccatcatcttcttgttgcacactccgtgaagatcccacaaccggcaaaaagggtgtgcactcccaagaggctgcagcaggcaacacatataaccataactttcgcaatcagttctgtggctgcggcgaacagtacgatgcggattcagaaaaggggacaatgtaccagtgcctaggacttggcaccgtcgagactggaggctgtggcgaggactggtggcacccggagtgtttgatcggcttgtcgcgtggttggaacaaggctgccctcaaggccaacggactcggtggcggtgatgccaccaatgacacttcagccgagggcgaagaagatctgcccccacctggctttcccgcagaggatgattttgaccatctgatttgcttcaaatgcgtcgactctaacccctggatcaaaccatatgcgggcactcctgggttcttgccgccagttttccgagaaggtggactaaaaaaggcctcgaatggggctgagctaaatatgactgagccaaacccctccgtacccgccactgagctcaaagagactgaacacaaggatcaggagaagatcgaacactcaaacaagcgcaaggcagacgacgagggtccgaccgaaggagagcctatcaccaagcggattaaagaggaagaagctcatgtcgaggaacaaccatcgaatgtcacaaaggaagaggagcctaccaaggaggaaaacgatactcctacaaagccatccgcccccaagcacacagagctcccgaagtccactccagtggaatcattctctctttttgccttggatgatttccatgggcagctgtgtcgctgtgcagagtgcttccctaagcttattccctacccccagcttcgcgaagaagaagatacctatgagcctccgatgtccgacgacggcctggctgatggtaccgcaagtgtcggtactggcagcatctacgaccgcggcgaagcagcactaaacaacatggatcgagtgcgcgccatcgaaggtgcaatggcatacaaccatctgcgtgacaaactcaaggtctttctgcaacccttcgctgagagtggacaggctgtcagcgcggaagatatcaagggatacttcgaggcgctacgtggtgatgagcagggcatcaaagatgccgctcatcacgcttctaccgtgaatggtgacggcaaggatgatactcacggagataagtgacacgagcagcatggcatatgactgactgtcaatttcttgtctgattcaccgaaaccgactcttcgctttggtcgcaaggtactgattatctttttttttctcgcaatctttttatcctttcggcgttatcatcatcgggtgctatatgggggtcttcgggggtggttcaacatgtacgatatttagcgaatatgggattgggaaattgggcaatggtgggaggtatgagtacgaacggcgcatcgtatgcaattgaaatgattactatctagcagagctcgaatgactccttcaattggggatcaacccaccttcatggtacaaatacagtggtctcatagcctccgggctaaatggccatgatgcaaccccccgagttataacgccaataccgaattaaatatatgatgtgggtggatatcatggccagcctgtccacgcaccgcaaaatatgatcaacagatatgcagcaagaatgaaaagactactccttgaggcgcttggaagccctcatcaatgaatcatctgggagtccactccgtttggtgccaggaagactaccggtgcgaatatcattgtcatcttgggtgacccgacggtgtgggtatttgccctcgataccctcgaagcagttaccactgatagggccaccattggtaaagtacgggtgctcaagcgcctgctcggcagtgagtcgcttcgctgggtcatattcaagcatacgcgacagaagatcgaatccatcggcgccaggagtgccagcactggaggtggacgtgtatccgccgttcttcaaacagctctgataccagccttcaagattagagccgcgatggaaatgtgaaggttggcggtggagcactagggtctggagttgggaatattcaggcatggaggctagacccggccaggactctttgcggggaagaccgaggatttcgacaatcttcatcatctggttacgttggaaagggactgttttcttgctgtccattttggcttcttcgcctttgaagattggtcgcagcgagagtagttcggcgaagatgcatcctattgcccacatatcgacggcaggagtatagtgccggctccccatgagcagctcgggtgcacggtaccagattgtgacgacgaccttgtctcccgagaacagggagttgagtggcttatagaacaggcgcgctagccccaagtcgccgatgcgaatggcgccacttgaggtgacgagaatattggctggtttcaaatcacgatgcaggacccaattggtatgaagatagagcaatccattcaacaactggaacatgatagaccggaccatagtcgccggaatggcatgtcgctgaggctgggtgtgatgatgaatgatctggagcaaatcatgctctgtatattcaaataccatgaagatgcatttgtcctccagaatgatctcttctagttggacaacattggcatgtgagagttcagtgcacaatgccatttcacggatagccgactgcgacaaacctgtgtactggatcgtttcgccttccttgtcgggcttgaatctggatgaggttagaatgaaaaaaaaaatcaaatgttggagggtttttacttcttgattgcaaactcccctttcttgccatttttcccgacggccttgtacacccggccataggtgccactgctgataaagcctactatgttataccgatctcggacccggactttgctggtatacccaccgggtcttcttgattcaatggcatctgtataaactcccagttagcatattccggttgccggattgagaatggaatgccaggcgagaatcccttccaatttgcacactcgcatcacaaagacaatatcatcacagagaatcaaagggaaagagttaccacgagaatagaatcctccagaattcaagaaagggaaaccctttccaaacatgatggaaagatagaaagagacaagccgttacaccaagaagccacgagtaatcagattcaaagaagatatataattaccatcgacagtagcctggtgactccgtttcaagttaccgactctggttcgcgagagagagccggaggaagagggcgggtttgtcagactcatttgtggatcagaagggccggcgatgttgtcactccattggcggggagatatcttctccgcgatttccagtttgaatacagagaaggattcgaaggattcgagagatattctaatgtattgcctgtatcgtctgaattgtaccccgtatgttgtacaatgcgatgagttcagcggagtcaacgcttagtcagatcacatgtcggatccatccagcttcaacttcttgtagcttcacatgttcttcaagtcaactagttcaagtccctgaattgtgaaggactctatgtgctaaatttaatgttacatttgcctacctaggcagaccttcccgtctgaccaacttgacctcagatcatcgtatctctacaatcagcaaaaaacgtcatcctaggctccggccctccctaacgtaccttcaacctgtcccggggcatcgattggcctaaatttatctcacaatggttttgggcacattaacacagtcgagggttacaccgtacttgatctatctcgtatttattgtcacgcttggtccgcttcaatttggcttccacctggtacgatagcatccctctatgtctactaaacatcactaatacgttcattacttaggcagagctcaatgcccctaaatctgtgataacatgtgaacgtcaagggattcattcttcgggaatcacgagtcttccacaatgctttcctatgaccccatcgcaatttggcctcgtctcttcgatctacacgctcggtggcttacttggagccctgctagcaggacccatcgcaaccaaatatggacgtctacttgcattacgagtcaccacgatattctttattctggggcctgtggcggagacacttgcaccagcaatttccctcttgagtcttggtagatttctctctggaattggttctggtgctgcaattgtggttggtcctatctacatttcggaaattgctcctcccagttctcgaggcctcttcggtgccttcacccaggtcatgaccaatgtcggtattttgttgacacaatccctgggatacttctggagcaaagcaagcctctggagactcatactggctgtggccggaatcatcggggccctggagctcttggggttgttcttggtaccagaaagtccttcgtggctcgcagaacaccagaagatcagtcaggcacgccgcgtcctgcagcggatccgcggtcgggatgccgacattgaagcggagattgagagttggagcacctcagatgtccctgcatctggcgaggaagagtccttgctctctaattcttccggtgacaggccgtctagaaaggctgcagtcacgttcatgcaggttgtcaaagacccctattaccgcccggctattattgctgtggttggcgtgatggtcgcccagcaactcaccgggatgaacagcattgttatgtacagcgtgtctttactccaaagcatcctaccaacgacggctgcgctactcacagtaattatatctgcggttaatctcgtgatcacgctggcgtgctctcccctgcccgatcgcattggccgaaaattgtgcctgatgctgagcatctgcggtatgggctgcagttccatacttctcgcgataagtatcttcatgagcgctaagattttgacggcgatcgctgccttactttttgtggcaagttttgcggtcggactaggcccggtcccctttatcctggcctccgagctcgtagggcccgaagctgtcggcgcggcacagagctgggcgcttggtgccaactggatcgcaacctttgtggtggcacaattcttcccagtgctcgatgatgcccttggtggccgtggacaggtatactgggtgtttgcagctatggctgggttgttcggtgtcttcatctatcgatatgtgccggaaaccaagggcagagctaatgccgacgaggtttggggacgagccgaccgacgacaagactgactccagatgagtcctattctagaaatttcatagcactatgatttccaggttgttcctcggctaaactacatagtagcactcaatatttgtataggatgcggggttactgcagggccggagtacattgcataagttgtacaagttttttttttagaaacaaagcaatacatacagtatgtccatggcatcgccaagtacacaataggcatccatttttccaattgccaccttatgatcctataataacctgcggtgtggaggtttctttgatgtcgacccccgtcgacccccgttgaccgcaattggcagtgtttctcccacttttccccctcaagtttctctgcaattccgttgagatcggccgatcatattcaaccaatccctgtttttggaaataacggagagaacctggaaattacagtgggtaaatccgtttcttggcctgtgatcgacccgggacacaaccagcggatcggcgatcagctctggggggctcttgaacgtcaatcgtctcgaccagggagcaagccacccgccccaaccctttctattccccctactttcttttcccttcttataatttttctcatttgtgtacatccgcaatggtccggttggctctcccccaacggttgagctcgcacctttcggcgaagagcgcgccgtcgactcccggacggagcagaagcaccagtccgttacgatcaccggaactcaaacctctgctgctgaaggtttcagtaatccgagtaagtgctgaacaattgtggaccattttcatgttggtgggctccctgactgattccaatggtttgattagggacgtaacctcgcagccaaagatcgaggtggcacgagcgacccagtaagcaccctgcgatcaaagacaattcgaatcgtgaccgcttacatgttgcacagtatttggtgattacattaggagatgcgaggcagtcgacgccgaccatattcaagaccctgaacccggaatggaacgtctccttcgacatgcccgtgatgggcgtgccgctgttggaagctctatgttgggatcatgatcgattcggcaaggattacctgggcgaattcgatatcgcattggaggacatatttgctgatggccaggtggaccaacaggtaggtgaagggacacgttgctcggacaattggggactcgggctgacttgattcatagcctaaatggtatactttgaattccaagcggaaggcgtctaaaaagaaggatagcactgtgtcgggcgagattctgctgcagttctcgctcgccgattctgcgaaccccgctgccacgccggcggaaatattctccaagttcaagaaattggtatactcgggtgatgaggatgaccagaactctcagatccctcccgccgatcttgatgacttggaccgggacgaggatagctccgatgagcctgatgacgcggcaggtggcccagaaggcggcccagaagggggagaaaagcgccggcgacttcgattggctcgcttgagacgcaagtccctggcagctcgtgcataccaattctcaggctcgggcaccggagtgcaaggtatcgttttcatggaaattgttcgcgtgaccgatctgcctcctgaacgaaatggtatgaatcattctcctgcacgcagaacgctagatgctaattgacgttctagtaacgcggacatcgttcgatatggatccttttgtcgtgacctctctaggaaggaaaaccttaagaactcctgtcatccgccataacctgaacccagagtatcatgagaaaatggtgtttcaggtgatgcggcacgaacagtcttataccatcagcttcagtgtgatagatcgagacaagttctccgggaatgactttgtcgcctctgcgggtttttctctgcggaatctcatccagtccggcccagaagcagaccccgagacgggattatatcactttgtagaggacctggaggaacctgatcacactaaaggtaccaagatagctcagcgacctggagttagaccctcgcattcttcgtcaagtctctccaaactggctcggcctataataaagacgcgccactccgcaacatcagtctcaagccaatcaatgctcgaagcgccaacgcccagtctccttacaccttcttccctcccagaagaaggaatttcagagatggatagtactaattcattggcgaccctgaacatgtatgatggcgagtcagccccgattgacgagaacggcttcagatcatatactattccccttatgctcaagaatagagaacggtgggaagacaaacattcgccagagctgcatgtcaagacgaagtatctgccatacagtgctctccgacagcatttctggaggttgatgctcaagcaatatgacgccgacgagagtggtcgcattgacaaggtggagatgacgacaatgcttgacactctcggttcgacgctaaaggagtcgacaattgacagtttcttcaaacgcttcagcgcggacaataagtctaatgaaaacgatgatttgacattcgaccaggcagtcatttgtctcgaggacacgcttcaaaccctgcagaagagaaattcaatggctgctcccagagcgctttcgcttcctctgtcaaacgccggaagccaagatagtgagccatctagcagcgacgagcacactttggaaaccaacaccattgctgctcttaatgccgatccgcacaacacatctattccaaccctgtccaatgaggaacaatccagttccgctgatgagtacctccagcccgatgatctcgcggacgatgggggcgaggagcacgtcgtcgaaattcgcgagtgcccactctgccaccagccacgtcttgggaaacgctctgatgcggatatcatcacgcacattgccacgtgcgcaagtcaggattggcgtcaggttgacaacttagttatgggtggttttgtgacttccagccaggcacagcgcaagtggtactccaaagtcattacaaagatctcatacggcgggtacaaactcggagcgaactcggccaatatccttgtacaagaccggatcaccggtcagataaacgaggaacgcatgagtgtatatgtgcgactcgggatccggctgctatataagggcatcaaaagtcgtgatatggaaaagaagcgaagtacgtaacccttgagctcaagtgtatatgttgacgaaaagatctgtttgctaacaaattctattagttcgccgtgtattgcgctctttgagtgtcaagcagggtcgcaaatacgatgacccagcctcggcatcgcagatcaaggactttatcaatttccaccagctggacatgtccgaagttctgatgcccctagagaacttccgcaatttcaatgaattcttctaccgtgccctcaagcccgatgcccgtccgtgctccgctcccgacgaacctaagattgttgtgtctcccgccgactgtcgctcggtggtatttgatcgcttgagcgatgcaactagcatctgggtcaagggccgtgagttctcgattgaaaggttgttaggcaatgcttacccggacgatgctgctcgataccgaaacggtgctgtcggagtgttccgtctggcacctcaagactaccaccgcttccacatccccgtagatggaataatgggtgaacccaagaccatcgagggcgagtattatacggtgaatcccatggcgatccgatccgccttggatgtatacggcgagaatgtccgcattctcgtccctattgactctgtcgcgcatggccgagtaatggttgtctgcgttggtgccatgatggtcggcagtacggtcatcacccggacagccggcgagaaggtttcacgagctgaagagctgggctacttcaaatttggtggcagcacccttctagtgctctttgaaaatggcaagctcaatttcgacaaggacctagcggaaaactccaagtgtgcactggaaactttggtaagagccgaactgatttatcttttttcatacttgatcaattgcatactaacactcctatcttatagatccgagttggcatgtcggtcggacacagcccggatattcctcagtatgaacctgatatgcccaagcagtcggagaacgtcactgccgaggaaatgcaagaagccaagcgccgcatcgagggcagccttgcaccaagcaagccctccaccctactcaagtcattccaatgatcctataatctgtctttctttttccttggagtggacagggctcaactcccaccgctctttctcactgaacatattgtttttcaacatcggtgtcggggtgttctttgttttccggtgaaaacatcatagcgtttatctagcagcatctgcgcattgcgaggattgggggtagaagaaatcagggtgttgcattttagagccagtcattcattaataacgcttaatatttgggatcatttaggtaaaagcagtagttagagtgatcaaagtagtagagcaacgttgaagtataacggtcgatagtcctaaactagactagcgcggtccccacgcgcccgaccaaaacaaccgcgtgcaagaatccaacccaccactcacaccccaacctgccgctcccttgcgtgtctttttcgcgattgaattgaaaaagtcgcctagtctgctgctccgcagctgcagttctgaattgggacgcgacccgcgcctaacattccgcgagccgactgccccgacctcaattcaaccgtgccacaaccctatacacacattaggtacccattgatcaacaaacggtctgattcggcaagaccgtgtcgagatcgatcagccgtttaggggggttaactcgagtccagcattcatacgcacacgggaatcgcgcttgttgttcctccaggaagcctcttcaaccaggggtatttgactggagaacaggacgtcacgaagcgactagtcgacaccggaacgggggtgtttgctttgccacccctaggtttattcccgagcacaataaccccgcgtgaacccctcctgacatgacagtcgcggtcctggcgaccacaacgaccaagacaaagcgtcgccaaccgctggggacgatttcaatggccggtccgaagacacaatcgcgctctgcaactgcgtacagtggaaccgtgaaggccaaggaacagaggactacgcgactcagcgcaagtaaacaagatctcgagcagagcacaaacaagctagggaagcggccagctggtgagtaatgtgccggggttggaagttgttgagcggtgttgaaagaatatgctaattcatctctagtggcatatgaggaggatgcagaagggttccagttctctctactaccatcaaagaagcccaggccatcaatcgaagcggtcccggaaatgccccattcagacgtggaaaatgcgcctcccaagtccacgccgaaaagaggacgcccacgaaaaaagccaacgggcgacgagaccacttcaagtacggtgccagcaaaggggaaaagcattgagcttccaagtaggagacctacgagaggaactgcgaagactacacacacagaatctgaatctcaaccaacaaacacgattcgcccatcacgaactcgcgacagcccagagcaccagccggaggcaaaaaagccgaaaaaagcaggacgaccaccaaaagccaaaaaacaagtgcaagtgtctgagtcaaatggatataattccccagtgcaaccgccagagggtacaaaggtggcactgccggtggccgatactccggtgattcagcgcaataaagagttcagaggcggaaagggtgataaaaacgataaagggcgacggcgaagcagcttgggtatgcgaggacgaagggccagttttttgatcgactcagggacatcaaatggtaagattctcggtctgcatgggctataaatggtcgaatgctgattttgtctcttttcttgtacagcattaccccatagagaagttggcacagcagatttttacaagcacatcgccgatgacggaatccctgaaccgcgaaggatgcgacaactattgatttggtgtgcgactcgtgcactaggggaaaagccctcaggaggctccaactcggacgatcaaagtgcgcgcttagcaggtacgtggaaccgtttacttacctagagggattttttatctgaccatttctagcgcgtgtgattcaagaggagcttcttcaggatttttcaaacaactcggagctttccaactggcttggtcgcgaagatttgaaccctccagccgtggtggtcaaaaaaccgaacccgcgaaacctgcaaaatacagacaagattaaggaattggaggagcatatacagaagtatgtgtatcaccaagagctgtctcgagtgtatagaactaacgaacttccagattacacaaagaaagacaatctctcaatgcgcttcttcgacagccagcgatcccaaccgttaaggctaaacctcaatctgacgacctacacaaagataagcaagcttcacgtaaatcacaacgcgaagaagtcgacccctctctcctcgatccctcacaacaagccatactagaattccttaatctcccgaatcagccagagggagaatcctctgccccatcctcaatccgaccacctatcacaccatctgccgtctctgctcaattatcacgcatcacatctgggctggcaccgacactcgatgccttcgcagccggtgtacatgacatcgaactataccgtgcctccgcggataccgtttcatcccgaatattacgcatctgtgcacagcgactggaagagcgcgatgcgcagaacacacaacgtcgcctcgcaatagaaggcaacgatgatgaacatccaccaccaacgagaattaaggaagatttgggtctcattctgggagctcttagtcgggtggagagacgatagaaaatactgttcattcgcttttctaggagatttctcctacgtatattcccaataatctgttttccagcgattcggcattcgttttcctttcttccttttttctgttcccttcggggattcaccatgaatgaattgattgatagcgatgatcttgacgaaaccccagcccaacaccatgggatggggaaaggcgcatttacaatggcatttcaattgtttgataagctcagagtttggggtttggatttgcaattctgagatatctgatgctccgcaaagtgcagagattcaagatgaagtgaataggtagtcaggtacctaatacatgccgtcaactaataaaaggctagaattgagatacttattcgatcccatctctacttcactggtcttgatataagttttagttttgagctcatggattctaggcgtcgatcttataggcccaggcgccttccttaacgagcttagtcagggatgctctcgacttgcttcttacagtgacggtgcataagtttggacacctcttcgtcgagattctccaatttcgggcttctcaccttcgcgctctcttccaaatcttcacacgagctctatcacaaactcaaagtccatccgaactggggatatgtcatatatcgcaccacttattcccctgaatctgacgcccacttctccactgcggtcaagtatgtcgaggcctttgtcaagaaatcattctttagggaatgcgcatctaaaaacgagagttcacctagcgtagatcccgccatttacgaggaaatccaggccaaatatagttcaaccgtcatagaagatgcggctctctttgatggtgcctcaattgattcgatacgcgctcattttgaggcatgggtggatgtccagggtcagcgtgattctttcaacaaataccgaatgtgcatagtcattgatgaggaatgtctgcaaacgctgctgggtacatcggcggaggccctagagcaggagactgaatacaagagagacaaaacaaagcgttatgtaaaaatcgagcacgctgcttcacccccggctattgtccttcgatatctagatgacgatcttttagaagcatccaatagccaacgcctcatcgacagacatcaagcccaccaatgtactagtgaactacggaaatggcgaatcctattccgtcatatttcgctaagatacatacaacgacaaagttcagacaaacagttttgttcttcccatctcgatattcatatatgacaccccagatgaaaaactaagaaaataaaaggacaggcacacgcgaaaggagagcctcgatgagtttagtcgtgactcgtgagaatcgtagcttctatatatgtccaaacggagaaggtcgggatagttagtcgatatagacttgatcggcgaggaaaatagagggaaagaaagaccgagatgacgcagcaaagaggctaataatactagcctttgcatttgccagtctcataaaacagaaaacaattagaatacagcaagtaaactcccgttcctcagattcggggttcatgtatgtgaaatgtccaagagactcggtagtcgagcatgacaacaaagcaatgcatgcaacaaaagagataaatgcaatatatgattgagggagaggtgatgagaaactccatggcctagaaactgaacaatccgcttcgcttcttgcctagcggataaaccaccaaagcggctaggaagagaccaactgtcgttccaatagcaacttgaaccatgccatatccg
